(19) United States
(12) Patent Application Publication
(10) Pub. No.: US 2023/0332119 A1
(43) Pub. Date: Oct. 19, 2023

(54) COMPOSITIONS COMPRISING A CAS12I2 VARIANT POLYPEPTIDE AND USES THEREOF

(71) Applicant: Arbor Biotechnologies, Inc., Cambridge, MA (US)

(72) Inventors: Shaorong CHONG, Arlington, MA (US); Brendan Jay HILBERT, Natick, MA (US); Quinton Norman WESSELLS, Cambridge, MA (US); Noah Michael JAKIMO, Cambridge, MA (US); Roy ZIBLAT, Newton, MA (US); Jason Michael CARTE, Cambridge, MA (US); Tia Marie DITOMMASO, Newton, MA (US); Jeffrey Raymond HASWELL, Needham, MA (US); Anthony James GARRITY, Hingham, MA (US); Colin Alexander MCGAW, Boston, MA (US); David A. SCOTT, San Francisco, CA (US); Derek Michael CERCHIONE, Cambridge, MA (US)

(21) Appl. No.: 17/916,270

(22) PCT Filed: Mar. 31, 2021
(86) PCT No.: PCT/US2021/025257

§ 371 Date: Sep. 30, 2022

Related U.S. Application Data
(60) Provisional application No. 63/147,850, filed on Feb. 10, 2021.
(60) Provisional application No. 63/147,968, filed on Feb. 10, 2021.
(60) Provisional application No. 63/085,752, filed on Sep. 30, 2020.
(60) Provisional application No. 63/085,792, filed on Sep. 30, 2020.
(60) Provisional application No. 63/085,862, filed on Sep. 30, 2020.
(60) Provisional application No. 63/085,895, filed on Sep. 30, 2020.
(60) Provisional application No. 63/063,819, filed on Aug. 10, 2020.
(60) Provisional application No. 63/063,831, filed on Aug. 10, 2020.
(60) Provisional application No. 63/063,859, filed on Aug. 10, 2020.
(60) Provisional application No. 63/063,879, filed on Aug. 10, 2020.
(60) Provisional application No. 63/026,277, filed on May 18, 2020.
(60) Provisional application No. 63/026,523, filed on May 18, 2020.
(60) Provisional application No. 63/026,562, filed on May 18, 2020.
(60) Provisional application No. 63/026,606, filed on May 18, 2020.
(60) Provisional application No. 63/012,007, filed on Apr. 17, 2020.
(60) Provisional application No. 63/002,999, filed on Mar. 31, 2020.
(60) Provisional application No. 63/003,064, filed on Mar. 31, 2020.
(60) Provisional application No. 63/003,090, filed on Mar. 31, 2020.

(51) Int. Cl. C12N 9/22; C12N 15/63; C12N 15/10; C12N 15/90

(52) U.S. Cl. CPC C12N 9/22; C12N 15/63; C12N 15/102; C12N 15/907; C12N 2310/20

(57) ABSTRACT

The present invention relates to variant Cas12i2 polypeptides, methods of producing the variant Cas12i2 polypeptides, processes for characterizing the variant Cas12i2 polypeptides, cells comprising the variant Cas12i2 polypeptides, and methods of using the variant Cas12i2 polypeptides. The invention further relates to complexes comprising the variant Cas12i2 polypeptides, methods of producing the complexes, processes for characterizing the complexes, cells comprising the complexes, and methods of using the complexes.

### SEQUENCE LISTING

[0001] The instant application contains a Sequence Listing which has been submitted electronically in ASCII format and is hereby incorporated by reference in its entirety. Said ASCII copy, created on Mar. 31, 2021, is named 51451-008WO5_Sequence_Listing_03_30_2021_ST25, and is 1,589,401 bytes in size.

### BACKGROUND

[0002] Clustered Regularly Interspaced Short Palindromic Repeats (CRISPR) and CRISPR-associated (Cas) genes, collectively known as CRISPR-Cas or CRISPR/Cas systems, are adaptive immune systems in archaea and bacteria that defend particular species against foreign genetic elements.

### SUMMARY OF THE INVENTION

[0003] It is against the above background that the present invention provides certain advantages and advancements over the prior art.

[0004] Although the invention disclosed herein is not limited to specific advantages or functionalities, the invention provides a variant Cas12i2 polypeptide comprising a sequence having at least 95% identity to a sequence set forth in any one of SEQ ID NOs: 3 to 146 or any one of SEQ ID NOs: 495 to 512.

[0005] In one aspect of the variant Cas12i2 polypeptide, the variant Cas12i2 polypeptide comprises the sequence set forth in SEQ ID NO: 4.

[0006] In another aspect of the variant Cas12i2 polypeptide, the variant Cas12i2 polypeptide comprises the sequence set forth in SEQ ID NO: 5.

[0007] In another aspect of the variant Cas12i2 polypeptide, the variant Cas12i2 polypeptide comprises the sequence set forth in SEQ ID NO: 495.

[0008] In another aspect of the variant Cas12i2 polypeptide, the variant Cas12i2 polypeptide comprises the sequence set forth in SEQ ID NO: 496.

[0009] In another aspect of the variant Cas12i2 polypeptide, the variant Cas12i2 polypeptide further comprises one or more substitution of Table 2.

[0010] In another aspect of the variant Cas12i2 polypeptide, the variant Cas12i2 polypeptide is a variant of a Cas12i2 polypeptide comprising the sequence set forth in SEQ ID NO: 2.

[0011] The invention yet further provides a composition comprising a variant Cas12i2 polypeptide as described herein, wherein the composition further comprises an RNA guide or a nucleic acid encoding the RNA guide, wherein the RNA guide comprises a direct repeat sequence and a spacer sequence.

[0012] In one aspect of the composition, the direct repeat sequence comprises a nucleotide sequence with at least 95% sequence identity to any one of SEQ ID NO: 492-494.

[0013] In another aspect of the composition, the direct repeat sequence comprises a nucleotide sequence set forth in any one of SEQ ID NO: 492-494.

[0014] In another aspect of the composition, the spacer sequence comprises between about 11 and about 50 nucleotides.

[0015] In another aspect of the composition, the spacer sequence comprises between about 15 and about 35 nucleotides.

[0016] In another aspect of the composition, the spacer sequence binds to a target nucleic acid sequence, wherein the target nucleic acid sequence is adjacent to a 5′-NTTN-3′ sequence.

[0017] In another aspect of the variant Cas12i2 polypeptide or the composition, the variant Cas12i2 polypeptide further comprises at least one nuclear localization signal (NLS), at least one nuclear export signal (NES), or at least one NLS and at least one NES.

[0018] In another aspect of the variant Cas12i2 polypeptide or the composition, the variant Cas12i2 polypeptide further comprises a peptide tag, a fluorescent protein, a base-editing domain, a DNA methylation domain, a histone residue modification domain, a localization factor, a transcription modification factor, a light-gated control factor, a chemically inducible factor, or a chromatin visualization factor.

[0019] In another aspect of the composition, the composition is present in a delivery system comprising a nanoparticle, a liposome, an exosome, a microvesicle, or a gene-gun.

[0020] The invention yet further provides a nucleic acid molecule encoding a variant Cas12i2 polypeptide as described herein.

[0021] The invention yet further provides a cell comprising a composition or variant Cas12i2 polypeptide as described herein.

[0022] In one aspect of the cell, the cell is a eukaryotic cell or a prokaryotic cell.

[0023] In another aspect of the cell, the cell is a mammalian cell or a plant cell.

[0024] In another aspect of the cell, the cell is a human cell.

[0025] The invention yet further provides a composition or formulation comprising a variant Cas12i2 polypeptide as described herein, and optionally an RNA guide and/or a cell.

[0026] The invention yet further provides a composition comprising a variant Cas12i2 polypeptide and an RNA guide, wherein the Cas12i2 variant polypeptide and the RNA guide form a complex, and wherein the variant Cas12i2 polypeptide exhibits increased complex formation with the RNA guide as compared to a parent polypeptide.

[0027] The invention yet further provides a composition comprising a variant Cas12i2 polypeptide and an RNA guide, wherein the Cas12i2 variant polypeptide and the RNA guide form a complex, and wherein the Cas12i2 variant polypeptide exhibits increased binding affinity to the RNA guide, as compared to a parent polypeptide.

[0028] The invention yet further provides a composition comprising a variant Cas12i2 polypeptide and an RNA guide, wherein the Cas12i2 variant polypeptide and the RNA guide form a complex, and the Cas12i2 variant polypeptide and the RNA guide exhibit increased protein-RNA interactions, as compared to a parent polypeptide and the RNA guide.

[0029] In one aspect of the composition, the variant Cas12i2 polypeptide exhibits increased complex formation, increased binding affinity to the RNA guide and/or increased stability over a range of temperatures, e.g., 20° C. to 65° C.

[0030] In another aspect of the composition, the variant Cas12i2 polypeptide exhibits increased complex formation, increased binding affinity to the RNA guide and/or increased stability over a range of incubation times.

[0031] In another aspect of the composition, the variant Cas12i2 polypeptide exhibits increased complex formation, increased binding affinity to the RNA guide and/or increased stability in a buffer having a pH in a range of about 7.3 to about 8.6.

[0032] In another aspect of the composition, the variant Cas12i2 polypeptide exhibits increased complex formation, increased binding affinity to the RNA guide and/or increased stability when a Tₘ value of the variant binary complex is at least 8° C. greater than the Tₘ value of the parent complex.

[0033] In another aspect of the composition, the parent polypeptide comprises the amino acid sequence of SEQ ID NO: 2.

[0034] In another aspect of the composition, the variant Cas12i2 polypeptide exhibits equivalent to or greater enzymatic activity than the parent polypeptide.

[0035] In another aspect of the composition, the equivalent to or greater enzymatic activity occurs at a temperature range from about 20° C. to about 90° C.

[0036] In another aspect of the composition, the variant Cas12i2 polypeptide exhibits increased stability and/or protein-RNA interactions.

[0037] In another aspect of the composition, the variant Cas12i2 polypeptide further lacks enzymatic activity.

[0038] In another aspect of the composition, the variant Cas12i2 polypeptide further exhibits increased enzymatic activity.

[0039] In another aspect of the composition, the variant Cas12i2 polypeptide exhibits increased RNA guide complex formation, RNA guide binding activity and/or RNA guide binding specificity.

[0040] In another aspect of the composition, the variant Cas12i2 polypeptide exhibits altered on-target binding.

[0041] In another aspect of the composition, the variant Cas12i2 polypeptide exhibits altered off-target binding.

[0042] The invention yet further provides a composition comprising a variant Cas12i2 polypeptide and an RNA guide, wherein the Cas12i2 variant polypeptide and the RNA guide form a variant binary complex, and wherein the variant binary complex exhibits decreased complex dissociation than a complex formed by a parent polypeptide and the RNA guide.

[0043] The invention yet further provides a composition comprising a variant Cas12i2 polypeptide and an RNA guide, wherein the Cas12i2 variant polypeptide and the RNA guide form a variant binary complex, and wherein the RNA guide exhibits decreased dissociation from the variant Cas12i2 polypeptide than an RNA guide of a parent complex.

[0044] The invention yet further provides a composition comprising a variant Cas12i2 polypeptide and an RNA guide, wherein the Cas12i2 variant polypeptide and the RNA guide form a variant binary complex, and wherein the variant binary complex exhibits increased stability than a complex formed by a parent polypeptide and the RNA guide.

[0045] In one aspect of the composition, the variant binary complex exhibits increased ternary complex formation, increased binding affinity to the target nucleic acid and/or increased stability over a range of temperatures, e.g., 20° C. to 65° C.

[0046] In another aspect of the composition, the variant binary complex exhibits increased stability over a range of incubation times.

[0047] In another aspect of the composition, the variant binary complex exhibits increased stability in a buffer having a pH in a range of about 7.3 to about 8.6.

[0048] In another aspect of the composition, the variant binary complex exhibits increased ternary complex formation, increased binding affinity to the target nucleic acid and/or increased stability hen a Tₘ value of the variant binary complex is at least 8° C. greater than the Tₘ value of the parent complex.

[0049] In another aspect of the composition, the parent polypeptide comprises the amino acid sequence of SEQ ID NO: 2.

[0050] In another aspect of the composition, the variant Cas12i2 polypeptide exhibits equivalent or greater enzymatic activity than the parent polypeptide.

[0051] In another aspect of the composition, the equivalent or greater enzymatic activity occurs at a temperature range from about 20° C. to about 90° C.

[0052] In another aspect of the composition, the variant Cas12i2 polypeptide exhibits increased stability and/or protein-RNA interactions.

[0053] In another aspect of the composition, the variant Cas12i2 polypeptide further lacks enzymatic activity.

[0054] In another aspect of the composition, the variant Cas12i2 polypeptide further exhibits increased enzymatic activity.

[0055] In another aspect of the composition, the variant Cas12i2 polypeptide exhibits increased RNA guide complex formation, RNA guide binding activity and/or RNA guide binding specificity.

[0056] In another aspect of the composition, the variant Cas12i2 polypeptide exhibits altered on-target binding.

[0057] In another aspect of the composition, the variant Cas12i2 polypeptide exhibits altered off-target binding.

[0058] The invention yet further provides a method of complexing a variant Cas12i2 polypeptide as described herein with an RNA guide, e.g., RNA guide, as described herein.

[0059] The invention yet further provides a composition comprising a variant Cas12i2 polypeptide, an RNA guide and a target nucleic acid, wherein the variant Cas12i2 polypeptide and the RNA guide form a variant binary complex, and wherein the variant binary complex exhibits increased ternary complex formation with the target nucleic acid as compared to a parent binary complex.

[0060] The invention yet further provides a composition comprising a variant Cas12i2 polypeptide, an RNA guide and a target nucleic acid, wherein the Cas12i2 variant polypeptide and the RNA guide form a variant binary complex, and wherein the variant binary complex exhibits increased binding affinity to the target nucleic acid, as compared to a parent binary complex.

[0061] The invention yet further provides a composition comprising a variant Cas12i2 polypeptide, an RNA guide and target nucleic acid, wherein the Cas12i2 variant polypeptide and the RNA guide form a variant binary complex, and wherein the variant binary complex exhibit increased protein-RNA interactions as compared to a parent binary complex.

[0062] The invention yet further provides a composition comprising a variant Cas12i2 polypeptide, an RNA guide and target nucleic acid, wherein the Cas12i2 variant polypeptide and the RNA guide form a variant binary complex, and wherein the variant binary complex exhibit increased protein-DNA interactions as compared to a parent binary complex.

[0063] In one aspect of the composition, the variant binary complex exhibits increased ternary complex formation, increased binding affinity to the target nucleic acid and/or increased stability over a range of temperatures, e.g., 20° C. to 65° C.

[0064] In another aspect of the composition, the variant binary complex exhibits increased ternary complex formation, increased binding affinity to the target nucleic acid and/or increased stability over a range of incubation times.

[0065] In another aspect of the composition, the variant binary complex exhibits increased ternary complex formation, increased binding affinity to the target nucleic acid and/or increased stability in a buffer having a pH in a range of about 7.3 to about 8.6.

[0066] In another aspect of the composition, the variant binary complex exhibits increased ternary complex formation, increased binding affinity to the target nucleic acid and/or increased stability when a Tₘ value of the binary complex is at least 8° C. greater than the Tₘ value of the parent binary complex.

[0067] In another aspect of the composition, the parent polypeptide comprises the amino acid sequence of SEQ ID NO: 2.

[0068] In another aspect of the composition, the variant binary complex exhibits equivalent to or greater enzymatic activity than the parent binary complex.

[0069] In another aspect of the composition, the equivalent to or greater enzymatic activity occurs at a temperature range from about 20° C. to about 90° C.

[0070] In another aspect of the composition, the variant binary complex exhibits increased stability and/or protein-RNA interactions.

[0071] In another aspect of the composition, the variant binary complex exhibits increased stability and/or protein-DNA interactions.

[0072] In another aspect of the composition, the variant binary complex further lacks enzymatic activity.

[0073] In another aspect of the composition, the variant binary complex further exhibits increased enzymatic activity.

[0074] In another aspect of the composition, the variant Cas12i2 polypeptide exhibits increased RNA guide complex formation, RNA guide binding activity and/or RNA guide binding specificity.

[0075] In another aspect of the composition, the variant binary complex exhibits increased target nucleic acid complex formation, target nucleic acid activity and/or target nucleic acid specificity.

[0076] In another aspect of the composition, the variant binary complex exhibits altered on-target binding.

[0077] In another aspect of the composition, the variant binary complex exhibits altered off-target binding

[0078] The invention yet further provides a composition comprising a variant Cas12i2 polypeptide, an RNA guide and target nucleic acid, wherein the Cas12i2 variant polypeptide and the RNA guide form a variant binary complex, wherein the variant binary complex and target nucleic acid form a variant ternary complex, and wherein the variant ternary complex exhibits decreased complex dissociation than a parent ternary complex.

[0079] The invention yet further provides a composition comprising a variant Cas12i2 polypeptide, an RNA guide and target nucleic acid, wherein the Cas12i2 variant polypeptide and the RNA guide form a variant binary complex, wherein the variant binary complex and target nucleic acid form a variant ternary complex, and wherein the target nucleic acid exhibits decreased dissociation from the variant ternary complex than a parent ternary complex.

[0080] The invention yet further provides a composition comprising a variant Cas12i2 polypeptide, an RNA guide and target nucleic acid, wherein the Cas12i2 variant polypeptide and the RNA guide form a variant binary complex, wherein the variant binary complex and target nucleic acid form a variant ternary complex, and wherein the variant ternary complex exhibits increased stability than a parent ternary complex.

[0081] In one aspect of the composition, the variant ternary complex exhibits increased stability over a range of temperatures, e.g., 20° C. to 65° C.

[0082] In another aspect of the composition, the variant ternary complex exhibits increased stability over a range of incubation times.

[0083] In another aspect of the composition, the variant ternary complex exhibits increased stability in a buffer having a pH in a range of about 7.3 to about 8.6.

[0084] In another aspect of the composition, the variant ternary complex exhibits increased stability hen a Tₘ value of the variant ternary complex is at least 8° C. greater than the Tₘ value of the parent ternary complex.

[0085] In another aspect of the composition, the parent polypeptide comprises the amino acid sequence of SEQ ID NO: 2.

[0086] In another aspect of the composition, the variant Cas12i2 polypeptide exhibits equivalent or greater enzymatic activity than the parent polypeptide.

[0087] In another aspect of the composition, the equivalent or greater enzymatic activity occurs at a temperature range from about 20° C. to about 90° C.

[0088] In another aspect of the composition, the variant Cas12i2 polypeptide exhibits increased stability and/or protein-RNA interactions.

[0089] In another aspect of the composition, the variant binary complex exhibits increased stability and/or protein-DNA interactions.

[0090] In another aspect of the composition, the variant ternary complex exhibits increased stability.

[0091] In another aspect of the composition, the variant binary complex further lacks enzymatic activity.

[0092] In another aspect of the composition, the variant binary complex further exhibits increased enzymatic activity.

[0093] In another aspect of the composition, the variant Cas12i2 polypeptide exhibits increased RNA guide complex formation, RNA guide binding activity and/or RNA guide binding specificity.

[0094] In another aspect of the composition, the variant binary complex exhibits increased target nucleic acid complex formation, target nucleic acid binding activity and/or target nucleic acid binding specificity.

[0095] In another aspect of the composition, the variant binary complex exhibits altered on-target binding.

[0096] In another aspect of the composition, the variant binary complex exhibits altered off-target binding.

[0097] The invention yet further provides a method of complexing a variant binary complex as described herein with a target nucleic acid, e.g., DNA, as described herein.

[0098] The invention yet further provides a composition comprising a variant Cas12i2 polypeptide and an RNA guide, wherein the variant Cas12i2 polypeptide and the RNA guide form a variant binary complex, and wherein the variant binary complex exhibits increased binding affinity to a target nucleic acid as compared to a parent binary complex.

[0099] The invention yet further provides a composition comprising a variant Cas12i2 polypeptide and an RNA guide, wherein the Cas12i2 variant polypeptide and the RNA guide form a variant binary complex, and wherein the variant binary complex exhibits increased target binding affinity to a target locus of a target nucleic acid as compared to a parent binary complex.

[0100] In one aspect of the composition, the variant binary complex exhibits increased ternary complex formation and/or increased stability over a range of temperatures, e.g., 20° C. to 65° C.

[0101] In another aspect of the composition, the variant binary complex exhibits increased ternary complex formation and/or increased stability over a range of incubation times.

[0102] In another aspect of the composition, the variant binary complex exhibits increased ternary complex formation and/or increased stability in a buffer having a pH in a range of about 7.3 to about 8.6.

[0103] In another aspect of the composition, the variant binary complex exhibits increased ternary complex formation and/or increased stability when a Tₘ value of the binary complex is at least 8° C. greater than the Tₘ value of the parent binary complex.

[0104] In another aspect of the composition, the parent polypeptide comprises the amino acid sequence of SEQ ID NO: 2.

[0105] In another aspect of the composition, the variant binary complex exhibits equivalent to or greater enzymatic activity than the parent binary complex.

[0106] In another aspect of the composition, the equivalent to or greater enzymatic activity occurs at a temperature range from about 20° C. to about 90° C.

[0107] In another aspect of the composition, the variant binary complex exhibits increased stability and/or protein-RNA interactions.

[0108] In another aspect of the composition, the variant binary complex exhibits increased stability and/or protein-DNA interactions.

[0109] In another aspect of the composition, the variant binary complex further lacks enzymatic activity.

[0110] In another aspect of the composition, the variant binary complex further exhibits increased enzymatic activity.

[0111] In another aspect of the composition, the variant Cas12i2 polypeptide exhibits increased RNA guide complex formation, RNA guide binding activity and/or RNA guide binding specificity.

[0112] In another aspect of the composition, the variant binary complex exhibits increased target nucleic acid complex formation, target nucleic acid activity and/or target nucleic acid specificity.

[0113] In another aspect of the composition, the variant binary complex exhibits altered on-target binding.

[0114] In another aspect of the composition, the variant binary complex exhibits altered off-target binding.

[0115] The invention yet further provides a composition comprising a plurality of variant Cas12i2 polypeptides and two or more distinct RNA guides, wherein the distinct RNA guides individually form variant binary complexes with separate variant Cas12i2 polypeptides, and wherein the variant binary complexes specifically bind with two or more target loci of a target nucleic acid.

[0116] The invention yet further provides a composition comprising a plurality of variant Cas12i2 polypeptides and two or more distinct RNA guides, wherein the distinct RNA guides individually form variant binary complexes with separate variant Cas12i2 polypeptides, and wherein the variant binary complexes exhibit increased on-target binding of two or more target loci of a target nucleic acid as compared to parent binary complexes.

[0117] The invention yet further provides a composition comprising a plurality of variant Cas12i2 polypeptides and two or more distinct RNA guides, wherein the distinct RNA guides individually form variant binary complexes with separate variant Cas12i2 polypeptides, and wherein the variant binary complexes exhibit increased on-target binding with two or more target loci of a target nucleic acid as compared to parent binary complexes.

[0118] The invention yet further provides a composition comprising a plurality of variant Cas12i2 polypeptides and two or more distinct RNA guides, wherein the distinct RNA guides individually form variant binary complexes with separate variant Cas12i2 polypeptides, and wherein the variant binary complexes exhibit on-target ternary complex formation with two or more target loci of a target nucleic acid.

[0119] The invention yet further provides a composition comprising a plurality of variant Cas12i2 polypeptides and two or more distinct RNA guides, wherein the distinct RNA guides individually form variant binary complexes with separate variant Cas12i2 polypeptides, and wherein the variant binary complexes exhibit increased ternary complex formation with two or more target loci of a target nucleic acid as compared to parent binary complexes.

[0120] In one aspect of the composition, the variant binary complex exhibits increased ternary complex formation with the target nucleic acid and/or increased stability over a range of temperatures, e.g., 20° C. to 65° C.

[0121] In another aspect of the composition, the variant binary complex exhibits increased ternary complex formation with the target nucleic acid and/or increased stability over a range of incubation times.

[0122] In another aspect of the composition, the variant binary complex exhibits increased ternary complex formation with the target nucleic acid and/or increased stability in a buffer having a pH in a range of about 7.3 to about 8.6.

[0123] In another aspect of the composition, the variant binary complex exhibits increased ternary complex formation with the target nucleic acid and/or increased stability when a Tₘ value of the binary complex is at least 8° C. greater than the Tₘ value of the parent binary complex.

[0124] In another aspect of the composition, the parent polypeptide comprises the amino acid sequence of SEQ ID NO: 2.

[0125] In another aspect of the composition, the variant Cas12i2 polypeptide exhibits equivalent or greater enzymatic activity than the parent polypeptide.

[0126] In another aspect of the composition, the equivalent or greater enzymatic activity occurs at a temperature range from about 20° C. to about 90° C.

[0127] In another aspect of the composition, the variant Cas12i2 polypeptide exhibits increased stability and/or protein-RNA interactions.

[0128] In another aspect of the composition, the variant binary complex exhibits increased stability and/or protein-DNA interactions.

[0129] In another aspect of the composition, the variant binary complex further lacks enzymatic activity.

[0130] In another aspect of the composition, the variant binary complex further exhibits increased enzymatic activity.

[0131] In another aspect of the composition, the variant Cas12i2 polypeptide exhibits increased RNA guide complex formation, RNA guide binding activity and/or RNA guide binding specificity.

[0132] In another aspect of the composition, the variant binary complex exhibits increased target nucleic acid ternary complex formation, target nucleic acid binding affinity and/or target nucleic acid binding specificity.

[0133] In another aspect of the composition, the variant binary complex exhibits altered on-target binding.

[0134] In another aspect of the composition, the variant binary complex exhibits altered off-target binding.

[0135] The invention yet further provides a method of complexing a variant binary complex described herein with a target nucleic acid, e.g., DNA, as described herein.

[0136] The invention yet further provides a composition comprising a variant Cas12i2 polypeptide and an RNA guide, wherein the Cas12i2 variant polypeptide and the RNA guide form a variant binary complex, and wherein the variant binary complex exhibits increased on-target binding affinity to a target locus of a target nucleic acid as compared to a parent binary complex.

[0137] The invention yet further provides a composition comprising a variant Cas12i2 polypeptide and an RNA guide, wherein the variant Cas12i2 polypeptide and the RNA guide form a variant binary complex, and wherein the variant binary complex exhibits decreased binding affinity to a non-target locus of a target nucleic acid as compared to a parent binary complex.

[0138] The invention yet further provides a composition comprising a variant Cas12i2 polypeptide and an RNA guide, wherein the variant Cas12i2 polypeptide and the RNA guide form a variant binary complex, and wherein the variant binary complex exhibits increased activity at an on-target locus of a target nucleic acid as compared to a parent binary complex.

[0139] The invention yet further provides a composition comprising a variant Cas12i2 polypeptide and an RNA guide, wherein the variant Cas12i2 polypeptide and the RNA guide form a variant binary complex, and wherein the variant binary complex exhibits decreased activity at a non-target locus of a target nucleic acid as compared to a parent binary complex.

[0140] In one aspect of the composition, the variant binary complex exhibits increased ternary complex formation at the target locus and/or increased stability over a range of temperatures, e.g., 20° C. to 65° C.

[0141] In another aspect of the composition, the variant binary complex exhibits increased ternary complex formation at the target locus and/or increased stability over a range of incubation times.

[0142] In another aspect of the composition, the variant binary complex exhibits increased ternary complex formation at the target locus and/or increased stability in a buffer having a pH in a range of about 7.3 to about 8.6.

[0143] In another aspect of the composition, the variant binary complex exhibits increased ternary complex formation at the target locus and/or increased stability when a Tₘ value of the binary complex is at least 8° C. greater than the Tₘ value of the parent binary complex.

[0144] In another aspect of the composition, the parent binary complex comprises a parent polypeptide that comprises the amino acid sequence of SEQ ID NO: 2.

[0145] In another aspect of the composition, the variant Cas12i2 polypeptide exhibits equivalent or greater enzymatic activity than the parent polypeptide.

[0146] In another aspect of the composition, the equivalent or greater enzymatic activity occurs at a temperature range from about 20° C. to about 90° C.

[0147] In another aspect of the composition, the variant binary complex exhibits increased stability and/or protein-RNA interactions.

[0148] In another aspect of the composition, the variant binary complex exhibits increased stability and/or protein-DNA interactions.

[0149] In another aspect of the composition, the variant Cas12i2 polypeptide exhibits increased binary complex formation, RNA guide binding activity and/or RNA guide binding specificity.

[0150] The invention yet further provides a composition comprising a plurality of variant Cas12i2 polypeptides and two or more distinct RNA guides, wherein the distinct RNA guides individually form a plurality of variant binary complexes with separate variant Cas12i2 polypeptides, and wherein the plurality of variant binary complexes exhibit increased on-target binding to two or more target loci of a target nucleic acid as compared to a plurality of parent binary complexes.

[0151] The invention yet further provides a composition comprising a plurality of variant Cas12i2 polypeptides and two or more distinct RNA guides, wherein the distinct RNA guides individually form a plurality of variant binary complexes with separate variant Cas12i2 polypeptides, and wherein the plurality of variant binary complexes exhibit decreased off-target binding to two or more non-target loci of a target nucleic acid as compared to a plurality of parent binary complexes.

[0152] The invention yet further provides a composition comprising a plurality of variant Cas12i2 polypeptides and two or more distinct RNA guides, wherein the distinct RNA guides individually form a plurality of variant binary complexes with separate variant Cas12i2 polypeptides, and wherein the plurality of variant binary complexes exhibit increased on-target activity at two or more target loci of a target nucleic acid as compared to a plurality of parent binary complexes.

[0153] The invention yet further provides a composition comprising a plurality of variant Cas12i2 polypeptides and two or more distinct RNA guides, wherein the distinct RNA guides individually form a plurality of variant binary complexes with separate variant Cas12i2 polypeptides, and wherein the plurality of variant binary complexes exhibit decreased off-target activity at two or more non-target loci of a target nucleic acid as compared to a plurality of parent binary complexes.

[0154] In one aspect of the composition, the plurality of variant binary complexes exhibit increased ternary complex formation at the target loci of the target nucleic acid and/or increased stability over a range of temperatures, e.g., 20° C. to 65° C.

[0155] In another aspect of the composition, the plurality of variant binary complexes exhibit increased ternary complex formation at the target loci of the target nucleic acid and/or increased stability over a range of incubation times.

[0156] In another aspect of the composition, the plurality of variant binary complexes exhibit increased ternary complex formation at the target loci the target nucleic acid and/or increased stability in a buffer having a pH in a range of about 7.3 to about 8.6.

[0157] In another aspect of the composition, the plurality of variant binary complexes exhibit increased ternary complex formation at the target loci of the target nucleic acid and/or increased stability when a Tₘ value of the binary complex is at least 8° C. greater than the Tₘ value of the parent binary complex.

[0158] In another aspect of the composition, the plurality of parent binary complexes comprise a parent polypeptide that comprises the amino acid sequence of SEQ ID NO: 2.

[0159] In another aspect of the composition, the variant Cas12i2 polypeptide exhibits equivalent or greater enzymatic activity than the parent polypeptide.

[0160] In another aspect of the composition, the equivalent or greater enzymatic activity occurs at a temperature range from about 20° C. to about 90° C.

[0161] In another aspect of the composition, the variant Cas12i2 polypeptide exhibits increased stability and/or protein-RNA interactions.

[0162] In another aspect of the composition, the plurality of variant binary complexes exhibit increased stability and/or protein-DNA interactions.

[0163] In another aspect of the composition, the variant Cas12i2 polypeptide exhibits increased binary complex formation, RNA guide binding activity and/or RNA guide binding specificity.

[0164] The invention yet further provides a method of complexing a variant binary complex as described herein with a target nucleic acid, e.g., DNA, as described herein.

[0165] The invention yet further provides a method of complexing a plurality of variant binary complexes described herein with a target nucleic acid, e.g., DNA, as described herein.

[0166] In one aspect of a composition or Cas12i2 polypeptide described herein, the variant Cas12i2 polypeptide comprises at least one of a D581, G624, F626, D835, L836, P868, S879, D911, 1926, V1020, V1030, E1035, and S1046 substitution of amino acid sequence of SEQ ID NO: 2.

[0167] In another aspect of the composition or Cas12i2 polypeptide, the variant Cas12i2 polypeptide comprises at least one of a D581G, D581R, G624R, F626G, F626R, D835G, D835R, L836G, L836R, P868G, P868R, P868T, S879G, S879R, D911G, D911R, 1926G, 1926R, V1020 G, V1020R, V1030G, V1030R, E1035G, E1035R, S1046G, and S1046R substitution of amino acid sequence of SEQ ID NO: 2.

[0168] In another aspect of the composition or Cas12i2 polypeptide, the variant Cas12i2 polypeptide comprises at least one of a D581R, G624R, F626R, P868T, D911R, 1926R, V1030G, E1035R, and S1046G substitution of amino acid sequence of SEQ ID NO: 2.

[0169] In another aspect of the composition or Cas12i2 polypeptide, the variant Cas12i2 polypeptide comprises at least one substitution listed in Table 1.

[0170] In another aspect of the composition or Cas12i2 polypeptide, the variant Cas12i2 polypeptide comprises any one amino acid sequence of SEQ ID NO: 3 to 146 or any one amino acid sequence of SEQ ID NOs: 495 to 512.

[0171] In another aspect of the composition or Cas12i2 polypeptide, the variant Cas12i2 polypeptide comprises at least one of an epitope peptide, nuclear localization signal, and nuclear export signal.

[0172] In another aspect of the composition, the RNA guide comprises a DNA targeting sequence.

[0173] In another aspect of the composition, the DNA targeting sequence is an RNA guide.

[0174] In another aspect of the composition, the DNA targeting sequence is between 13 to 30 nucleotides.

[0175] In another aspect of the composition, the RNA guide comprises a direct repeat sequence linked to a DNA targeting sequence.

[0176] In another aspect of the composition, the composition further comprises a target nucleic acid.

[0177] In another aspect of the composition, the target nucleic acid is present in a cell.

[0178] In another aspect of the composition, the variant Cas12i2 polypeptide and RNA guide are encoded in a vector, e.g., expression vector.

[0179] The invention yet further provides a cell comprising a composition as described herein.

[0180] The invention yet further provides a method of expressing a vector as described herein.

[0181] The invention yet further provides a method of producing a composition as described herein.

[0182] The invention yet further provides a method of delivering a composition as described herein.

[0183] The invention yet further provides a kit or system comprising a composition as described herein or one or more component thereof.

[0184] In one aspect of a composition described herein, the RNA guide comprises or consists of, or about, 43 nucleotides.

[0185] In another aspect of the composition, the RNA guide is a tracr-less RNA guide.

[0186] In another aspect of the composition or Cas12i2 polypeptide, the variant Cas12i2 polypeptide further exhibits about 40× greater enzymatic activity than parent polypeptide.

[0187] In another aspect of the composition or Cas12i2 polypeptide, the variant Cas12i2 polypeptide exhibits increased on-target specificity as compared to the parent polypeptide.

[0188] In another aspect of the composition or Cas12i2 polypeptide, the variant Cas12i2 polypeptide exhibits decreased off-target specificity as compared to the parent polypeptide.

[0189] In another aspect of the composition, the variant Cas12i2 polypeptide selectively induces a deletion adjacent to a 5′-NTTN-3′ sequence, wherein N is any nucleotide.

[0190] In another aspect of the composition, the deletion is downstream of the 5′-NTTN-3′ sequence.

[0191] In another aspect of the composition, the parent polypeptide does not induce the deletion.

[0192] In another aspect of the composition, the length of the deletion is greater than the length of a Cas9 polypeptide-induced deletion.

[0193] In another aspect of the composition, the deletion is in a gene of a cell.

[0194] In another aspect of the composition, the deletion is up to about 40 nucleotides in length.

[0195] In another aspect of the composition, the deletion is from about 4 nucleotides to 40 nucleotides in length.

[0196] In another aspect of the composition, the deletion is from about 4 nucleotides to 25 nucleotides in length.

[0197] In another aspect of the composition, the deletion is from about 10 nucleotides to 25 nucleotides in length.

[0198] In another aspect of the composition, the deletion is from about 10 nucleotides to 15 nucleotides in length.

[0199] In another aspect of the composition, the deletion starts within about 5 nucleotides to about 15 nucleotides of the 5′-NTTN-3′ sequence.

[0200] In another aspect of the composition, the deletion starts within about 5 nucleotides to about 10 nucleotides of the 5′-NTTN-3′ sequence.

[0201] In another aspect of the composition, the deletion starts within about 10 nucleotides to about 15 nucleotides of the 5′-NTTN-3′ sequence.

[0202] In another aspect of the composition, the deletion starts within about 5 nucleotides to about 15 nucleotides downstream of the 5′-NTTN-3′ sequence.

[0203] In another aspect of the composition, the deletion starts within about 5 nucleotides to about 10 nucleotides downstream of the 5′-NTTN-3′ sequence.

[0204] In another aspect of the composition, the deletion starts within about 10 nucleotides to about 15 nucleotides downstream of the 5′-NTTN-3′ sequence.

[0205] In another aspect of the composition, the deletion ends within about 20 nucleotides to about 30 nucleotides of the 5′-NTTN-3′ sequence.

[0206] In another aspect of the composition, the deletion ends within about 20 nucleotides to about 25 nucleotides of the 5′-NTTN-3′ sequence.

[0207] In another aspect of the composition, the deletion ends within about 25 nucleotides to about 30 nucleotides of the 5′-NTTN-3′ sequence.

[0208] In another aspect of the composition, the deletion ends within about 20 nucleotides to about 30 nucleotides downstream of the 5′-NTTN-3′ sequence.

[0209] In another aspect of the composition, the deletion ends within about 20 nucleotides to about 25 nucleotides downstream of the 5′-NTTN-3′ sequence.

[0210] In another aspect of the composition, the deletion ends within about 25 nucleotides to about 30 nucleotides downstream of the 5′-NTTN-3′ sequence.

[0211] In another aspect of the composition, the deletion starts within about 5 nucleotides to about 15 nucleotides downstream of the 5′-NTTN-3′ sequence and ends within about 20 nucleotides to about 30 nucleotides downstream of the 5′-NTTN-3′ sequence.

[0212] In another aspect of the composition, the deletion starts within about 5 nucleotides to about 15 nucleotides downstream of the 5′-NTTN-3′ sequence and ends within about 20 nucleotides to about 25 nucleotides downstream of the 5′-NTTN-3′ sequence.

[0213] In another aspect of the composition, the deletion starts within about 5 nucleotides to about 15 nucleotides downstream of the 5′-NTTN-3′ sequence and ends within about 25 nucleotides to about 30 nucleotides downstream of the 5′-NTTN-3′ sequence.

[0214] In another aspect of the composition, the deletion starts within about 5 nucleotides to about 10 nucleotides downstream of the 5′-NTTN-3′ sequence and ends within about 20 nucleotides to about 30 nucleotides downstream of the 5′-NTTN-3′ sequence.

[0215] In another aspect of the composition, the deletion starts within about 5 nucleotides to about 10 nucleotides downstream of the 5′-NTTN-3′ sequence and ends within about 20 nucleotides to about 25 nucleotides downstream of the 5′-NTTN-3′ sequence.

[0216] In another aspect of the composition, the deletion starts within about 5 nucleotides to about 10 nucleotides downstream of the 5′-NTTN-3′ sequence and ends within about 25 nucleotides to about 30 nucleotides downstream of the 5′-NTTN-3′ sequence.

[0217] In another aspect of the composition, the deletion starts within about 10 nucleotides to about 15 nucleotides downstream of the 5′-NTTN-3′ sequence and ends within about 20 nucleotides to about 30 nucleotides downstream of the 5′-NTTN-3′ sequence.

[0218] In another aspect of the composition, the deletion starts within about 10 nucleotides to about 15 nucleotides downstream of the 5′-NTTN-3′ sequence and ends within about 20 nucleotides to about 25 nucleotides downstream of the 5′-NTTN-3′ sequence.

[0219] In another aspect of the composition, the deletion starts within about 10 nucleotides to about 15 nucleotides downstream of the 5′-NTTN-3′ sequence and ends within about 25 nucleotides to about 30 nucleotides downstream of the 5′-NTTN-3′ sequence.

[0220] In another aspect of the composition, the 5′-NTTN-3′ sequence is 5′-NTTY-3′, 5′-NTTC-3′, 5′-NTTT-3′, 5′-NTTA-3′, 5′-NTTB-3′, 5′-NTTG-3′, 5′-CTTY-3′, 5‘-DTTR’3′, 5′-CTTR-3′, 5′-DTTT-3′, 5′-ATTN-3′, or 5′-GTTN-3′, wherein Y is C or T, B is any nucleotide except for A, D is any nucleotide except for C, and R is A or G.

[0221] In another aspect of the composition, the 5′-NTTN-3′ sequence is 5′-CTTT-3′, 5′-CTTC-3′, 5′-GTTT-3′, 5′-GTTC-3′, 5′-TTTC-3′, 5′-GTTA-3′, or 5′-GTTG-3′.

[0222] In another aspect of the composition, the deletion is in an exon of the gene, e.g., B2M, TRAC, PDCD1.

[0223] In another aspect of the composition, the deletion overlaps with a mutation in the gene.

[0224] In another aspect of the composition, the deletion overlaps with an insertion in the gene.

[0225] In another aspect of the composition, the deletion removes a repeat expansion of the gene.

[0226] In another aspect of the composition, the deletion disrupts one or both alleles of the gene.

[0227] In another aspect of the composition, the deletion is induced in a eukaryotic cell or a prokaryotic cell.

[0228] In another aspect of the composition, the deletion is induced in an animal cell, a plant cell, or a fungal cell or the cell is derived from an animal cell, a plant cell, or a fungal cell.

[0229] In another aspect of the composition, the deletion is induced in a mammalian cell or derived from a mammalian cell.

[0230] In another aspect of the composition, the deletion is induced in a human cell or derived from a human cell.

[0231] In another aspect of the composition, the deletion is induced in a primary cell.

[0232] In another aspect of the composition, the deletion is induced in a cell line.

[0233] In another aspect of the composition, the deletion is induced in a T cell.

[0234] In another aspect of the composition, the deletion is induced in a stem cell (e.g., a totipotent/omnipotent stem cell, a pluripotent stem cell, a multipotent stem cell, an oligopotent stem cell, or an unipotent stem cell), a differentiated cell, or a terminally differentiated cell.

[0235] In another aspect of the composition, 2 or more (e.g., multiplexed targeted deletions) deletions are induced.

[0236] The invention yet further provides a method of obtaining a deletion in a cell, wherein the method comprises contacting a variant Cas12i2 polypeptide or complex as described herein with DNA in the cell.

[0237] The invention yet further provides a composition or formulation comprising a variant Cas12i2 polypeptide as described herein, an RNA guide, and a cell.

[0238] The invention yet further provides a method of producing a composition as described herein.

[0239] The invention yet further provides a method of complexing a variant Cas12i2 polypeptide as described herein with an RNA guide, such as an RNA guide described herein.

[0240] The invention yet further provides a method of complexing a variant binary complex as described herein with a target nucleic acid.

[0241] The invention yet further provides a method of delivering a composition as described herein.

[0242] The invention yet further provides a composition comprising a variant Cas12i2 polypeptide, wherein the variant Cas12i2 polypeptide comprises a substitution that increases interactions between the variant Cas12i2 polypeptide and a nucleic acid, as compared to a parent polypeptide.

[0243] In one aspect of the composition, the variant Cas12i2 polypeptide comprises the sequence set forth in SEQ ID NO: 4.

[0244] In another aspect of the composition, the variant Cas12i2 polypeptide comprises the sequence set forth in any one of SEQ ID NO: 3, SEQ ID NO: 5, SEQ ID NO: 495, and SEQ ID NO: 496.

[0245] In another aspect of the composition, the interactions are electrostatic interactions.

[0246] In another aspect of the composition, the interactions are non-specific interactions.

[0247] In another aspect of the composition, the interactions are aromatic, hydrophobic, Van der Waals, and/or cation-pi interactions.

[0248] In another aspect of the composition, the substitution is in or adjacent to a nucleic acid interface.

[0249] In another aspect of the composition, the nucleic acid is an RNA guide comprising a direct repeat sequence and a spacer sequence.

[0250] In another aspect of the composition, the direct repeat sequence comprises a nucleotide sequence with at least 95% sequence identity to any one of SEQ ID NO: 492-494.

[0251] In another aspect of the composition, the direct repeat sequence comprises a nucleotide sequence set forth in any one of SEQ ID NO: 492-494.

[0252] In another aspect of the composition, the substitution increases interactions between the variant Cas12i2 polypeptide and the direct repeat sequence.

[0253] In another aspect of the composition, the substitution increases binary complex formation, as compared to a parent polypeptide.

[0254] In another aspect of the composition, a binary complex comprising the variant Cas12i2 polypeptide exhibits increased stability, as compared to a parent binary complex.

[0255] In another aspect of the composition, the substitution is an arginine, lysine, glutamine, asparagine, histidine, tyrosine, or serine substitution.

[0256] In another aspect of the composition, the substitution is in an RNA binding interface.

[0257] In another aspect of the composition, the substitution is a substitution in the Wedge domain or Rec2 domain.

[0258] In another aspect of the composition, the substitution is a substitution listed in Table 4.

[0259] In another aspect of the composition, the variant Cas12i2 polypeptide comprises a sequence having at least 95% identity to a sequence set forth in any one of SEQ ID NOs: 3 to 146 or in any one of SEQ ID NOs: 495-512.

[0260] In another aspect of the composition, the variant Cas12i2 polypeptide comprises a sequence having at least 95% identity to a sequence set forth in any one of SEQ ID NOs: 3 to 146 or in any one of SEQ ID NOs: 495 to 512 and further having a substitution listed in Table 4.

[0261] In another aspect of the composition, the variant Cas12i2 polypeptide comprises a sequence set forth in any one of SEQ ID NOs: 3 to 146 or in any one of SEQ ID NOs: 495 to 512.

[0262] In another aspect of the composition, the variant Cas12i2 polypeptide comprises a sequence set forth in any one of SEQ ID NOs: 3 to 146 or in any one of SEQ ID NOs: 495 to 512 and further has a substitution listed in Table 4.

[0263] In another aspect of the composition, the direct repeat sequence is set forth in SEQ ID NO: 492 and the variant Cas12i2 polypeptide comprises a sequence set forth in SEQ ID NO: 4.

[0264] In another aspect of the composition, the direct repeat sequence is set forth in SEQ ID NO: 492 and the variant Cas12i2 polypeptide comprises the sequence set forth in any one of SEQ ID NO: 3, SEQ ID NO: 5, SEQ ID NO: 495, and SEQ ID NO: 496.

[0265] In another aspect of the composition, the nucleic acid is a target nucleic acid.

[0266] In another aspect of the composition, the nucleic acid is double-stranded DNA.

[0267] In another aspect of the composition, the substitution increases interactions between the variant Cas12i2 polypeptide and double-stranded DNA.

[0268] In another aspect of the composition, the double-stranded DNA comprises a PAM sequence.

[0269] In another aspect of the composition, the substitution increases ternary complex formation, as compared to a parent polypeptide.

[0270] In another aspect of the composition, a ternary complex comprising the variant Cas12i2 polypeptide exhibits increased stability, as compared to a parent ternary complex.

[0271] In another aspect of the composition, the substitution is an arginine, lysine, glutamine, asparagine, histidine, or serine substitution.

[0272] In another aspect of the composition, the substitution is in a double-stranded DNA binding interface.

[0273] In another aspect of the composition, the substitution is a substitution in the Rec1 domain, PI domain, or Wedge domain.

[0274] In another aspect of the composition, the substitution is a substitution listed in Table 5.

[0275] In another aspect of the composition, the variant Cas12i2 polypeptide comprises a sequence having at least 95% identity to a sequence set forth in any one of SEQ ID NOs: 3-146 or in any one of SEQ ID NOs: 495-512.

[0276] In another aspect of the composition, the variant Cas12i2 polypeptide comprises a sequence having at least 95% identity to a sequence set forth in any one of SEQ ID NOs: 3-146 or in any one of SEQ ID NOs: 495-512 and further having a substitution listed in Table 5.

[0277] In another aspect of the composition, the variant Cas12i2 polypeptide comprises a sequence set forth in any one of SEQ ID NOs: 3-146 or in any one of SEQ ID NOs: 495-512.

[0278] In another aspect of the composition, the variant Cas12i2 polypeptide comprises a sequence set forth in any one of SEQ ID NOs: 3-146 or in any one of SEQ ID NOs: 495-512 and further has a substitution listed in Table 5.

[0279] In another aspect of the composition, the nucleic acid is single-stranded DNA.

[0280] In another aspect of the composition, the single-stranded DNA comprises a non-target strand.

[0281] In another aspect of the composition, the single-stranded DNA comprises a target strand.

[0282] In another aspect of the composition, the substitution increases ternary complex formation, as compared to a parent polypeptide.

[0283] In another aspect of the composition, a ternary complex comprising the variant Cas12i2 polypeptide exhibits increased stability, as compared to a parent ternary complex.

[0284] In another aspect of the composition, the substitution is an arginine, lysine, glutamine, asparagine, histidine, or alanine substitution.

[0285] In another aspect of the composition, the substitution is in a single-stranded DNA binding interface.

[0286] In another aspect of the composition, the substitution is a substitution in the PI domain, Rec1 domain, Wedge domain, RuvC domain, Rec2 domain, or Nuc domain.

[0287] In another aspect of the composition, the substitution is a substitution listed in Table 6.

[0288] In another aspect of the composition, the variant Cas12i2 polypeptide comprises a sequence having at least 95% identity to a sequence set forth in any one of SEQ ID NOs: 3 to 146 or in any one of SEQ ID NOs: 495 to 512.

[0289] In another aspect of the composition, the variant Cas12i2 polypeptide comprises a sequence having at least 95% identity to a sequence set forth in any one of SEQ ID NOs: 3 to 146 or in any one of SEQ ID NOs: 495 to 512 and further having a substitution listed in Table 6.

[0290] In another aspect of the composition, the variant Cas12i2 polypeptide comprises a sequence set forth in any one of SEQ ID NOs: 3 to 146 or in any one of SEQ ID NOs: 495 to 512.

[0291] In another aspect of the composition, the variant Cas12i2 polypeptide comprises a sequence set forth in any one of SEQ ID NOs: 3 to 146 or in any one of SEQ ID NOs: 495 to 512 and further has a substitution listed in Table 6.

[0292] In another aspect of the composition, the substitution increases interactions between the variant Cas12i2 polypeptide and a DNA/RNA hybrid molecule.

[0293] In another aspect of the composition, the DNA/RNA hybrid molecule is a heteroduplex comprising a spacer sequence of an RNA guide and a target strand.

[0294] In another aspect of the composition, the substitution stabilizes the heteroduplex.

[0295] In another aspect of the composition, the substitution increases ternary complex formation, as compared to a parent polypeptide.

[0296] In another aspect of the composition, a ternary complex comprising the variant Cas12i2 polypeptide exhibits increased stability, as compared to a parent ternary complex.

[0297] In another aspect of the composition, the substitution is an arginine, lysine, glutamine, asparagine, histidine, or serine substitution.

[0298] In another aspect of the composition, the substitution is a substitution in the Rec1 domain, PI domain, Rec2 domain, or RuvC2 motif.

[0299] In another aspect of the composition, the substitution is a substitution listed in Table 7.

[0300] In another aspect of the composition, the variant Cas12i2 polypeptide comprises a sequence having at least 95% identity to a sequence set forth in any one of SEQ ID NOs: 3-146 or in any one of SEQ ID NOs: 495-512.

[0301] In another aspect of the composition, the variant Cas12i2 polypeptide comprises a sequence having at least 95% identity to a sequence set forth in any one of SEQ ID NOs: 3-146 or in any one of SEQ ID NOs: 495-512 and further having a substitution listed in Table 7.

[0302] In another aspect of the composition, the variant Cas12i2 polypeptide comprises a sequence set forth in any one of SEQ ID NOs: 3-146 or in any one of SEQ ID NOs: 495-512.

[0303] In another aspect of the composition, the variant Cas12i2 polypeptide comprises a sequence set forth in any one of SEQ ID NOs: 3-146 or in any one of SEQ ID NOs: 495-512 and further has a substitution listed in Table 7.

[0304] In another aspect of the composition, the substitution increases interactions between the variant Cas12i2 polypeptide and bases of (a) a double-stranded DNA duplex and/or (b) a heteroduplex comprising a spacer sequence of an RNA guide and a target strand.

[0305] In another aspect of the composition, the double-stranded DNA duplex comprises a PAM sequence.

[0306] In another aspect of the composition, the interactions are aromatic, hydrophobic, Van der Waals, and/or cation-pi interactions.

[0307] In another aspect of the composition, the substitution stabilizes the R-loop.

[0308] In another aspect of the composition, the substitution increases ternary complex formation, as compared to a parent polypeptide.

[0309] In another aspect of the composition, a ternary complex comprising the variant Cas12i2 polypeptide exhibits increased stability, as compared to a parent ternary complex.

[0310] In another aspect of the composition, the substitution is an arginine, lysine, tryptophan, phenylalanine, tyrosine, methionine, histidine, glutamine, threonine, or valine substitution.

[0311] In another aspect of the composition, the substitution is a substitution in the Wedge domain, Rec1 domain, or RuvC domain.

[0312] In another aspect of the composition, the substitution is a substitution listed in Table 8.

[0313] In another aspect of the composition, the variant Cas12i2 polypeptide comprises a sequence having at least 95% identity to a sequence set forth in any one of SEQ ID NOs: 3-146 or in any one of SEQ ID NOs: 495-512.

[0314] In another aspect of the composition, the variant Cas12i2 polypeptide comprises a sequence having at least 95% identity to a sequence set forth in any one of SEQ ID NOs: 3-146 or in any one of SEQ ID NOs: 495-512 and further having a substitution listed in Table 8.

[0315] In another aspect of the composition, the variant Cas12i2 polypeptide comprises a sequence set forth in any one of SEQ ID NOs: 3-146 or in any one of SEQ ID NOs: 495-512.

[0316] In another aspect of the composition, the variant Cas12i2 polypeptide comprises a sequence set forth in any one of SEQ ID NOs: 3-146 or in any one of SEQ ID NOs: 495-512 and further has a substitution listed in Table 8.

[0317] In another aspect of the composition, the parent polypeptide comprises the amino acid sequence of SEQ ID NO: 2.

[0318] In another aspect of the composition, the variant Cas12i2 polypeptide exhibits increased enzymatic activity, as compared to a parent polypeptide.

[0319] In another aspect of the composition, the composition further comprises an RNA guide comprising a direct repeat sequence and a spacer sequence.

[0320] In another aspect of the composition, the direct repeat sequence comprises a nucleotide sequence with at least 95% sequence identity to any one of SEQ ID NO: 492-494.

[0321] In another aspect of the composition, the direct repeat sequence comprises a nucleotide sequence set forth in any one of SEQ ID NO: 492-494.

[0322] In another aspect of the composition, the direct repeat sequence is set forth in SEQ ID NO: 492 and the variant Cas12i2 polypeptide comprises a sequence set forth in SEQ ID NO: 4. 239.

[0323] In another aspect of the composition, the direct repeat sequence is set forth in SEQ ID NO: 492 and the variant Cas12i2 polypeptide comprises the sequence set forth in any one of SEQ ID NO: 3, SEQ ID NO: 5, SEQ ID NO: 495, and SEQ ID NO: 496.

[0324] The invention yet further provides a cell comprising a composition described herein.

[0325] In one aspect of the cell, the composition does not substantially affect viability of the cell.

[0326] The invention yet further provides a composition comprising a variant Cas12i2 polypeptide, wherein the variant Cas12i2 polypeptide comprises a substitution that increases flexibility of the variant Cas12i2 polypeptide during DNA binding, as compared to a parent polypeptide.

[0327] In one aspect of the composition, the variant Cas12i2 polypeptide comprises the sequence set forth in SEQ ID NO: 4.

[0328] In another aspect of the composition, the Cas12i2 polypeptide comprises the sequence set forth in any one of SEQ ID NO: 3, SEQ ID NO: 5, SEQ ID NO: 495, and SEQ ID NO: 496.

[0329] In another aspect of the composition, the substitution increases binding of the variant Cas12i2 polypeptide to DNA.

[0330] In another aspect of the composition, the substitution increases binding of the variant Cas12i2 polypeptide to double-stranded DNA.

[0331] In another aspect of the composition, the substitution increases binding of the variant Cas12i2 polypeptide to single-stranded DNA.

[0332] In another aspect of the composition, the substitution increases ternary complex formation, as compared to a parent polypeptide.

[0333] In another aspect of the composition, a ternary complex comprising the variant Cas12i2 polypeptide exhibits increased stability, as compared to a parent ternary complex.

[0334] In another aspect of the composition, the substitution is a substitution of a bulky amino acid to an amino acid with a smaller side chain.

[0335] In another aspect of the composition, the substitution is an alanine, valine, glycine, or serine substitution.

[0336] In another aspect of the composition, the substitution is in the Helical II domain of the variant Cas12i2 polypeptide.

[0337] In another aspect of the composition, the substitution is a substitution listed in Table 9.

[0338] In another aspect of the composition, the variant Cas12i2 polypeptide comprises a sequence having at least 95% identity to a sequence set forth in any one of SEQ ID NOs: 3-146 or in any one of SEQ ID NOs: 495-512.

[0339] In another aspect of the composition, the variant Cas12i2 polypeptide comprises a sequence having at least 95% identity to a sequence set forth in any one of SEQ ID NOs: 3-146 or in any one of SEQ ID NOs: 495-512 and further having a substitution listed in Table 9.

[0340] In another aspect of the composition, the variant Cas12i2 polypeptide comprises a sequence set forth in any one of SEQ ID NOs: 3-146 or in any one of SEQ ID NOs: 495-512.

[0341] In another aspect of the composition, the variant Cas12i2 polypeptide comprises a sequence set forth in any one of SEQ ID NOs: 3-146 or in any one of SEQ ID NOs: 495-512 and further has a substitution listed in Table 9.

[0342] The invention yet further provides a composition comprising a variant Cas12i2 polypeptide, wherein the variant Cas12i2 polypeptide comprises a substitution that stabilizes a domain-domain interface that forms during ternary complex formation, as compared to a parent polypeptide.

[0343] In one aspect of the composition, the variant Cas12i2 polypeptide comprises the sequence set forth in SEQ ID NO: 4.

[0344] In another aspect of the composition, the variant Cas12i2 polypeptide comprises the sequence set forth in any one of SEQ ID NO: 3, SEQ ID NO: 5, SEQ ID NO: 495, and SEQ ID NO: 496.

[0345] In another aspect of the composition, the domain-domain interface forms when single-stranded DNA contacts an active site of the variant Cas12i2 polypeptide.

[0346] In another aspect of the composition, the domain-domain interface is a Helical II domain-Nuc domain interface.

[0347] In another aspect of the composition, the substitution increases ternary complex formation, as compared to a parent polypeptide.

[0348] In another aspect of the composition, a ternary complex comprising the variant Cas12i2 polypeptide exhibits increased stability, as compared to a parent ternary complex.

[0349] In another aspect of the composition, the substitution is an aspartic acid, glutamic acid, arginine, or lysine substitution.

[0350] In another aspect of the composition, the substitution is a substitution listed in Table 10.

[0351] In another aspect of the composition, the variant Cas12i2 polypeptide comprises a sequence having at least 95% identity to a sequence set forth in any one of SEQ ID NOs: 3-146 or in any one of SEQ ID NOs: 495-512.

[0352] In another aspect of the composition, the variant Cas12i2 polypeptide comprises a sequence having at least 95% identity to a sequence set forth in any one of SEQ ID NOs: 3-146 or in any one of SEQ ID NOs: 495-512 and further having a substitution listed in Table 10.

[0353] In another aspect of the composition, the variant Cas12i2 polypeptide comprises a sequence set forth in any one of SEQ ID NOs: 3-146 or in any one of SEQ ID NOs: 495-512.

[0354] In another aspect of the composition, the variant Cas12i2 polypeptide comprises a sequence set forth in any one of SEQ ID NOs: 3-146 or in any one of SEQ ID NOs: 495-512 and further has a substitution listed in Table 10.

[0355] In another aspect of the composition, the parent polypeptide comprises the amino acid sequence of SEQ ID NO: 2.

[0356] In another aspect of the composition, the variant Cas12i2 polypeptide exhibits increased enzymatic activity, as compared to a parent polypeptide.

[0357] In another aspect of the composition, the composition further comprises an RNA guide comprising a direct repeat sequence and a spacer sequence.

[0358] In another aspect of the composition, the direct repeat sequence comprises a nucleotide sequence with at least 95% sequence identity to any one of SEQ ID NO: 492-494.

[0359] In another aspect of the composition, the direct repeat sequence comprises a nucleotide sequence set forth in any one of SEQ ID NO: 492-494.

[0360] In another aspect of the composition, the direct repeat sequence is set forth in SEQ ID NO: 492 and the variant Cas12i2 polypeptide comprises a sequence set forth in SEQ ID NO: 4.

[0361] In another aspect of the composition, the direct repeat sequence is set forth in SEQ ID NO: 492 and the variant Cas12i2 polypeptide comprises the sequence set forth in any one of SEQ ID NO: 3, SEQ ID NO: 5, SEQ ID NO: 495, and SEQ ID NO: 496.

[0362] The invention yet further provides a cell comprising the composition as described herein.

[0363] In one aspect of the cell, the composition does not substantially affect viability of the cell.

[0364] The invention yet further provides a composition comprising a variant Cas12i2 polypeptide, wherein the variant Cas12i2 polypeptide comprises a substitution that increases on-target specificity of the variant Cas12i2 polypeptide, as compared to a parent polypeptide.

[0365] In one aspect of the composition, the variant Cas12i2 polypeptide comprises the sequence set forth in SEQ ID NO: 4.

[0366] In another aspect of the composition, the variant Cas12i2 polypeptide comprises the sequence set forth in any one of SEQ ID NO: 3, SEQ ID NO: 5, SEQ ID NO: 495, and SEQ ID NO: 496.

[0367] In another aspect of the composition, the substitution increases on-target DNA binding.

[0368] In another aspect of the composition, the substitution decreases off-target DNA binding.

[0369] In another aspect of the composition, the substitution increases on-target ternary complex formation, as compared to a parent polypeptide.

[0370] In another aspect of the composition, an on-target ternary complex comprising the variant Cas12i2 polypeptide exhibits increased stability, as compared to a parent ternary complex.

[0371] In another aspect of the composition, the substitution is a substitution of an amino acid contacting the spacer sequence of an RNA guide.

[0372] In another aspect of the composition, the substitution is a substitution of a bulky amino acid to an amino acid with a smaller side chain.

[0373] In another aspect of the composition, the substitution is an alanine, serine, valine, glutamine, or asparagine substitution.

[0374] In another aspect of the composition, the substitution is a substitution in the Wedge domain, Rec1 domain, Rec2 domain, or RuvC domain.

[0375] In another aspect of the composition, the substitution is a substitution in the Helical II domain.

[0376] In another aspect of the composition, the substitution is a substitution listed in Table 11.

[0377] In another aspect of the composition, the variant Cas12i2 polypeptide comprises a sequence having at least 95% identity to a sequence set forth in any one of SEQ ID NOs: 3-146 or in any one of SEQ ID NOs: 495-512.

[0378] In another aspect of the composition, the variant Cas12i2 polypeptide comprises a sequence having at least 95% identity to a sequence set forth in any one of SEQ ID NOs: 3-146 or in any one of SEQ ID NOs: 495-512 and further having a substitution listed in Table 11.

[0379] In another aspect of the composition, the variant Cas12i2 polypeptide comprises a sequence set forth in any one of SEQ ID NOs: 3-146 or in any one of SEQ ID NOs: 495-512.

[0380] In another aspect of the composition, the variant Cas12i2 polypeptide comprises a sequence set forth in any one of SEQ ID NOs: 3-146 or in any one of SEQ ID NOs: 495-512 and further has a substitution listed in Table 11.

[0381] In another aspect of the composition, the substitution decreases a catalysis rate (Kcat) of the variant Cas12i2 polypeptide.

[0382] In another aspect of the composition, the substitution is an alanine, serine, threonine, valine, leucine, methionine, asparagine, or isoleucine substitution.

[0383] In another aspect of the composition, the substitution is a substitution in the Wedge domain, Rec1 domain, Rec2 domain, or RuvC domain.

[0384] In another aspect of the composition, the substitution is a substitution in the RuvC domain.

[0385] In another aspect of the composition, the substitution is a substitution listed in Table 12.

[0386] In another aspect of the composition, the variant Cas12i2 polypeptide comprises a sequence having at least 95% identity to a sequence set forth in any one of SEQ ID NOs: 3-146 or in any one of SEQ ID NOs: 495-512.

[0387] In another aspect of the composition, the variant Cas12i2 polypeptide comprises a sequence having at least 95% identity to a sequence set forth in any one of SEQ ID NOs: 3-146 or in any one of SEQ ID NOs: 495-512 and further having a substitution listed in Table 12.

[0388] In another aspect of the composition, the variant Cas12i2 polypeptide comprises a sequence set forth in any one of SEQ ID NOs: 3-146 or in any one of SEQ ID NOs: 495-512.

[0389] In another aspect of the composition, the variant Cas12i2 polypeptide comprises a sequence set forth in any one of SEQ ID NOs: 3-146 or in any one of SEQ ID NOs: 495-512 and further has a substitution listed in Table 12.

[0390] In another aspect of the composition, the variant Cas12i2 polypeptide exhibits increased on-target enzymatic activity, as compared to a parent polypeptide.

[0391] In another aspect of the composition, the variant Cas12i2 polypeptide exhibits decreased off-target enzymatic activity, as compared to a parent polypeptide.

[0392] In another aspect of the composition, the variant Cas12i2 polypeptide exhibits off-target editing that is no more than 10% of the on-target editing.

[0393] In another aspect of the composition, the variant Cas12i2 polypeptide exhibits off-target editing that is no more than 5% of the on-target editing.

[0394] In another aspect of the composition, the composition further comprises an RNA guide comprising a direct repeat sequence and a spacer sequence.

[0395] In another aspect of the composition, the direct repeat sequence comprises a nucleotide sequence with at least 95% sequence identity to any one of SEQ ID NO: 492-494.

[0396] In another aspect of the composition, the direct repeat sequence comprises a nucleotide sequence set forth in any one of SEQ ID NO: 492-494.

[0397] In another aspect of the composition, the direct repeat sequence is set forth in SEQ ID NO: 492 and the variant Cas12i2 polypeptide comprises a sequence set forth in SEQ ID NO: 4.

[0398] In another aspect of the composition, the direct repeat sequence is set forth in SEQ ID NO: 492 and the variant Cas12i2 polypeptide comprises the sequence set forth in any one of SEQ ID NO: 3, SEQ ID NO: 5, SEQ ID NO: 495, and SEQ ID NO: 496.

[0399] The invention yet further provides a cell comprising the composition as described herein.

[0400] In one aspect of the cell, the composition does not substantially affect viability of the cell.

[0401] In another aspect of the composition, the variant Cas12i2 polypeptide exhibits a higher ratio of on-target binding to off-target binding, as compared to a Cas9 polypeptide.

[0402] In another aspect of the composition, the variant Cas12i2 polypeptide exhibits a higher ratio of on-target activity to off-target activity, as compared to a Cas9 polypeptide.

[0403] In another aspect of the composition, the variant Cas12i2 polypeptide exhibits a higher ratio of on-target editing to off-target editing, as compared to a Cas9 polypeptide.

[0404] In another aspect of the composition, the variant Cas12i2 polypeptide exhibits less off-target binding, as compared to a Cas9 polypeptide.

[0405] In another aspect of the composition, the variant Cas12i2 polypeptide exhibits less off-target activity, as compared to a Cas9 polypeptide.

[0406] In another aspect of the composition, the variant Cas12i2 polypeptide exhibits less off-target editing, as compared to a Cas9 polypeptide.

[0407] In another aspect of the composition, off-target binding, off-target activity, and/or off-target editing by the variant Cas12i2 polypeptide is at least 10% less than off-target binding, off-target activity, and/or off-target editing by a Cas9 polypeptide.

[0408] In another aspect of the composition, off-target binding, off-target activity, and/or off-target editing by the variant Cas12i2 polypeptide is at least 20% less than off-target binding, off-target activity, and/or off-target editing by a Cas9 polypeptide.

[0409] In another aspect of the composition, off-target binding, off-target activity, and/or off-target editing by the variant Cas12i2 polypeptide is at least 30% less than off-target binding, off-target activity, and/or off-target editing by a Cas9 polypeptide.

[0410] In another aspect of the composition, off-target binding, off-target activity, and/or off-target editing by the variant Cas12i2 polypeptide is at least 40% less than off-target binding, off-target activity, and/or off-target editing by a Cas9 polypeptide.

[0411] In another aspect of the composition, off-target binding, off-target activity, and/or off-target editing by the variant Cas12i2 polypeptide is at least 50% less than off-target binding, off-target activity, and/or off-target editing by a Cas9 polypeptide.

[0412] In yet another aspect, the invention provides a cell comprising a composition described herein.

[0413] In one aspect of the cell, the composition does not substantially affect viability of the cell.

### Definitions

[0414] The present invention will be described with respect to particular embodiments and with reference to certain Figures, but the invention is not limited thereto but only by the claims. Terms as set forth hereinafter are generally to be understood in their common sense unless indicated otherwise.

[0415] As used herein, the term “activity” refers to a biological activity. In some embodiments, the activity refers to effector activity. In some embodiments, activity includes enzymatic activity, e.g., catalytic ability of an effector. For example, activity can include nuclease activity. In some embodiments, activity includes binding activity, e.g., binding activity of an effector to an RNA guide and/or target nucleic acid.

[0416] As used herein, the term “adjacent to” refers to a nucleotide or amino acid sequence in close proximity to another nucleotide or amino acid sequence. In some embodiments, a nucleotide sequence is adjacent to another nucleotide sequence if no nucleotides separate the two sequences. In some embodiments, a nucleotide sequence is adjacent to another nucleotide sequence if a small number of nucleotides separate the two sequences (e.g., about 1, 2, 3, 4, 5, 6, 7, 8, 9, 10, 11, 12, 13, 14, 15, 16, 17, 18, 19, or 20 nucleotides). In some embodiments, a first sequence is adjacent to a second sequence if the two sequences are separated by about 5, 6, 7, 8, 9, 10, 11, 12, 13, 14, or 15 nucleotides. In some embodiments, the term “adjacent to” is used to refer a protein residue that interacts with another protein residue. In some embodiments, the term “adjacent to” is used to refer a protein residue that interacts with a nucleotide or nucleic acid. In some embodiments, the term “adjacent to” is used to refer to a protein domain or motif that interacts with another protein domain or motif. In some embodiments, the term “adjacent to” is used to refer to a protein domain or motif that interacts with a nucleotide or nucleic acid sequence. As used herein, the term “adjacent to” is used to refer to the positioning of an indel (insertion/deletion) in a modified cell of the disclosure.

[0417] As used herein, the term “complex” refers to a grouping of two or more molecules. In some embodiments, the complex comprises a polypeptide and a nucleic acid molecule interacting with (e.g. binding to, coming into contact with, adhering to) one another.

[0418] As used herein, the term “binary complex” refers to a grouping of two molecules (e.g., a polypeptide and a nucleic acid molecule). In some embodiments, a binary complex refers to a grouping of a polypeptide and a targeting moiety (e.g., an RNA guide). In some embodiments, a binary complex refers to a ribonucleoprotein (RNP). As used herein, the term “variant binary complex” refers to the grouping of a variant Cas12i2 polypeptide and RNA guide. As used herein, the term “parent binary complex” refers to the grouping of a parent polypeptide and RNA guide or a reference polypeptide and RNA guide.

[0419] As used herein, the term “ternary complex” refers to a grouping of three molecules (e.g., a polypeptide and two nucleic acid molecules). In some embodiments, a “ternary complex” refers to a grouping of a polypeptide, an RNA molecule, and a DNA molecule. In some embodiments, a ternary complex refers to a grouping of a polypeptide, a targeting moiety (e.g., an RNA guide), and a target nucleic acid (e.g., a target DNA molecule). In some embodiments, a “ternary complex” refers to a grouping of a binary complex (e.g., a ribonucleoprotein) and a third molecule (e.g., a target nucleic acid). As used herein, the terms “variant ternary complex,” “variant Cas12i2 ternary complex,” and “Cas12i2 variant ternary complex” refer to the grouping of a variant Cas12i2 polypeptide, RNA guide, and target nucleic acid (e.g., a variant Cas12i2 ribonucleoprotein and target nucleic acid). As used herein, the terms “parent ternary complex,” “parent Cas12i2 ternary complex,” and “Cas12i2 parent ternary complex” refer to the grouping of a parent polypeptide, RNA guide, and target nucleic acid (e.g., a parent ribonucleoprotein and target nucleic acid) or a reference polypeptide, RNA guide, and target nucleic acid (e.g., a reference ribonucleoprotein and target nucleic acid).

[0420] As used herein, the term “deletion” refers to a loss or removal of nucleotides in a nucleic acid sequence. The deletion can be in a genome of an organism. The deletion can be in a cell. The deletion can be a DNA sequence. The deletion can be an RNA sequence. The deletion can be a frameshift mutation or a non-frameshift mutation. A Cas12i2-induced deletion described herein can refer to a deletion of up to about 100 nucleotides, such as from about 4 nucleotides and 100 nucleotides, from about 4 nucleotides and 50 nucleotides, from about 4 nucleotides and 40 nucleotides, from about 4 nucleotides and 25 nucleotides, from about 10 nucleotides and 25 nucleotides, from about 10 nucleotides and 15 nucleotides, from a nucleic acid molecule. In some embodiments, a Cas12i2-induced deletion described herein occurs downstream of a 5′-NTTN-3′ sequence. In some embodiments, the term “Cas12i2-induced” refers to a deletion that results from a DNA break induced by a Cas12i2 polypeptide. In some embodiments, the term “Cas12i2-induced” refers to a deletion that results from a DNA break induced by a Cas12i2 polypeptide and repaired by a cell's DNA repair machinery.

[0421] As used herein, the term “domain” refers to a distinct functional and/or structural unit of a polypeptide. In some embodiments, a domain may comprise a conserved amino acid sequence.

[0422] As used herein, the terms “editing efficiency” and “indel activity” refer to the ability of an enzyme (e.g., a variant Cas12i2 polypeptide) to introduce an indel (insertion/deletion) into a sequence. For example, in some embodiments, an enzyme that introduces an indel into each of ten target loci exhibits an editing efficiency of 100%. An enzyme that introduces an indel into five out of ten target loci exhibits an editing efficiency of 50%. In another example, an enzyme that introduces an indel at a target locus in 50% of a plurality of cells exhibits an editing efficiency of 50%. As used herein, the terms “editing efficiency,” “indel activity,” and “on-target editing” refer to the ability of an enzyme (e.g., a variant Cas12i2 polypeptide) to selectively introduce an indel at a target locus. In some embodiments, editing efficiency at a target locus is compared to editing efficiency at a non-target locus. In some embodiments, editing at a target locus is compared to editing at a non-target locus.

[0423] As used herein, the term “effector activity” refers to a biological activity. In some embodiments, effector activity includes enzymatic activity, e.g., catalytic ability of an effector. For example, effector activity can include nuclease activity.

[0424] As used herein, the term “interface” refers to one or more residues of a variant Cas12i2 polypeptide (e.g., a domain/motif or a portion of a domain/motif) in contact with (e.g., that interact with or are adjacent to) a nucleic acid molecule or a distinct domain/motif or a portion of a distinct domain/motif of the variant Cas12i2 polypeptide. In some aspects, an interface is a buried surface area between adjacent domains or motifs. In some aspects, an interface is a surface area between the a polypeptide and a ligand (e.g., DNA or RNA) where the polypeptide and ligand make contact. As used herein, the term “nucleic acid interface” refers to residues of the variant Cas12i2 polypeptide that are in close proximity to (e.g., are adjacent to) or interact with a nucleic acid sequence (e.g., a DNA sequence or an RNA sequence). As used herein, the term “RNA binding interface” refers to the residues of the variant Cas12i2 polypeptide that are in close proximity to (e.g., are adjacent to) or interact with an RNA guide (e.g., the direct repeat of the RNA guide). As used herein, the term “double-stranded DNA binding interface” refers to the residues of the variant Cas12i2 polypeptide that are in close proximity to (e.g., are adjacent to) and/or interact with double-stranded DNA. As used herein, the term “single-stranded DNA binding interface” refers to the residues of the variant Cas12i2 polypeptide that are in close proximity to (e.g., are adjacent to) and/or interact with single-stranded DNA. As used herein, the term “domain-domain interface” refers to a domain in close-proximity to (e.g., adjacent to) a separate domain. In some embodiments, a domain-domain interface (e.g., a Helical II domain-Nuc domain interface) forms upon complex formation (e.g., ternary complex formation).

[0425] As used herein, the terms “parent,” “parent polypeptide,” and “parent sequence” refer to an original polypeptide (e.g., starting polypeptide) to which an alteration is made to produce a variant Cas12i2 polypeptide of the present invention. In some embodiments, the parent is a polypeptide having an identical amino acid sequence of the variant with one or more variations at one or more specified positions. In exemplary embodiments, variations refer to amino acid changes within the polypeptide sequence. The parent may be a naturally occurring (wild-type) polypeptide. In a particular embodiment, the parent is a polypeptide with at least 60%, at least 61%, at least 62%, at least 63%, at least 64%, at least 65%, at least 70%, at least 72%, at least 73%, at least 74%, at least 75%, at least 80%, at least 81%, at least 82%, at least 83%, at least 84%, at least 85%, at least 90%, at least 91%, at least 92%, at least 93%, at least 94%, at least 95%, at least 96%, at least 97%, at least 98%, at least 99% or 100% identity to a polypeptide of SEQ ID NO: 2. In some embodiments, variations may include structural changes suck as linkages, fusions, or other changes that do not alter the original amino acid sequence of the parent. In some embodiments, the parent polypeptide sequence includes amino acid variations and structural changes.

[0426] As used herein, a “plurality of variant binary complexes” refers to a plurality of binary complexes comprising a plurality of variant Cas12i2 polypeptides. A plurality of binary complexes comprising a plurality of parent polypeptides (e.g., wild-type Cas12i2 polypeptides parent of SEQ ID NO: 2) are referred to herein as a “plurality of parent binary complexes.” A plurality of Cas12i2 polypeptides, e.g., a plurality of variant Cas12i2 polypeptides, and two or more distinct targeting moieties, e.g., two or more distinct RNA guides, individually form two or more binary complexes (e.g., a plurality of binary complexes). In such embodiments, complex formation may be accomplished simultaneously in a single composition or independently in separate compositions.

[0427] As used herein, the term “protospacer adjacent motif” or “PAM” refers to a DNA sequence adjacent to a target sequence to which a binary complex comprising a polypeptide (e.g., an enzyme such as Cas12i2 or a variant thereof) and a targeting moiety (e.g., an RNA guide) binds. In some embodiments, a PAM is required for enzyme activity. In the case of a double-stranded target, the targeting moiety (e.g., the RNA guide) binds to a first strand of the target, and a PAM sequence as described herein is present in the second, complementary strand. For example, in some embodiments, the RNA guide binds to the target strand (e.g., the spacer-complementary strand), and the PAM sequence as described herein is present in the non-target strand (i.e., the non-spacer-complementary strand). In some embodiments, the target strand (i.e., the spacer-complementary strand) comprises a 5′-NAAN-3′ sequence.

[0428] As used herein, the terms “reference composition,” “reference molecule,” “reference sequence,” “reference,” and “reference complex” refer to a control, such as a negative control or a parent (e.g., a parent sequence, a parent protein, a wild-type protein, or a complex comprising a parent sequence). For example, a reference molecule refers to a Cas12i2 polypeptide to which a variant Cas12i2 polypeptide is compared. Likewise, a reference RNA guide refers to a targeting moiety to which a modified RNA guide is compared. The variant or modified molecule may be compared to the reference molecule on the basis of sequence (e.g., the variant or modified molecule may have X % sequence identity or homology with the reference molecule), thermostability, or activity (e.g., the variant or modified molecule may have X % of the activity of the reference molecule). For example, where the reference molecule is a Cas12i2 polypeptide, a variant or modified molecule may be characterized as having no more than 10% of an activity of the reference Cas12i2 polypeptide or may be characterized as having at least 10% greater of an activity of the reference Cas12i2 polypeptide. Examples of reference Cas12i2 polypeptides include naturally occurring unmodified Cas12i2 polypeptides, e.g., naturally occurring Cas12i2 polypeptide from archaea or other bacterial species. In certain embodiments, the reference Cas12i2 polypeptide is a naturally occurring Cas12i2 polypeptide having the closest sequence identity or homology with the variant Cas12i2 polypeptide to which it is being compared. In certain embodiments, the reference Cas12i2 polypeptide is a parental molecule having a naturally occurring or known sequence on which a mutation has been made to arrive at the variant Cas12i2 polypeptide.

[0429] As used herein, the terms “RNA guide” or “RNA guide sequence” refer to any RNA molecule that facilitates the targeting of a polypeptide described herein to a target nucleic acid. For example, an RNA guide can be a molecule that recognizes (e.g., binds to) a target nucleic acid. An RNA guide may be designed to be complementary to a specific nucleic acid sequence. An RNA guide comprises a DNA targeting sequence and a direct repeat (DR) sequence. The terms CRISPR RNA (crRNA), pre-crRNA and mature crRNA are also used herein to refer to an RNA guide.

[0430] As used herein, the term “substantially identical” refers to a sequence, polynucleotide, or polypeptide, that has a certain degree of identity to a reference sequence.

[0431] As used herein, the term “targeting moiety” refers to a molecule or component (e.g., nucleic acid and/or RNA guide) that facilitates the targeting of another molecule or component to a target nucleic acid. In some embodiments, the targeting moiety specifically interacts or associates with the target nucleic acid.

[0432] As used herein, the terms “target nucleic acid,” “target sequence,” “target substrate,” and “on-target locus” refer to a nucleic acid sequence to which a targeting moiety (e.g., RNA guide) specifically binds. In some embodiments, the DNA targeting sequence of an RNA guide binds to a target nucleic acid. Binding of a binary complex to a target locus is referred to herein as “on-target binding.”

[0433] As used herein, the terms “non-target” and “off-target” refer to a nucleic acid sequence other than the sequence to which a targeting moiety specifically binds or is intended to specifically bind. A non-target locus is an unintended target of a targeting moiety (e.g., an RNA guide). Binding of a binary complex to a non-target locus is referred to herein as “off-target binding.” In some embodiments, a non-target locus is a locus on a target nucleic acid. In some embodiments, a non-target locus is a locus on a nucleic acid other than the target nucleic acid (e.g., a non-target nucleic acid).

[0434] As used herein, the terms “upstream” and “downstream” refer to relative positions within a single nucleic acid (e.g., DNA) sequence in a nucleic acid molecule. As used herein, the terms “upstream” and “downstream” refer to the positioning of two sequences relative to one another. “Upstream” and “downstream” relate to the 5′ to 3′ direction, respectively, in which RNA transcription occurs. A first sequence is upstream of a second sequence when the 3′ end of the first sequence occurs before the 5′ end of the second sequence. A first sequence is downstream of a second sequence when the 5′ end of the first sequence occurs after the 3′ end of the second sequence. As used herein, the terms “upstream” and “downstream” are used to refer to the relative positioning of a deletion in reference to a 5‘-NTTN’-3′ sequence. As used herein, the 5′-NTTN-3′ sequence is upstream of a Cas12i2-induced deletion, and a Cas12i2-induced deletion is downstream of the 5′-NTTN-3′ sequence.

[0435] As used herein, the terms “variant Cas12i2 polypeptide” and “variant effector polypeptide” refer to a polypeptide comprising an alteration, e.g., a substitution, insertion, deletion and/or fusion, at one or more residue positions, compared to a parent polypeptide. As used herein, the terms “variant Cas12i2 polypeptide” and “variant effector polypeptide” refer to a polypeptide comprising an alteration as compared to the polypeptide of SEQ ID NO: 2.

### BRIEF DESCRIPTION OF THE DRAWINGS

[0436] FIG. 1 is a schematic showing wild-type Cas12i2 (SEQ ID NO: 2) and Cas12i2 variants set forth in SEQ ID NOs: 3-5, 495, or 496. The RuvC motifs and mutated residues are depicted.

[0437] FIG. 2 shows an overlapping PCR method to introduce single mutations and generate linear DNA templates expressing variant Cas12i2 sequences.

[0438] FIG. 3A is a DNA EMSA gel showing the ability of RNPs prepared with a) wild-type Cas12i2 (SEQ ID NO: 2), variant Cas12i2 of SEQ ID NO: 3, or variant Cas12i2 of SEQ ID NO: 4 and b) crRNA 1 (SEQ ID NO: 147) to bind an AAVS1 dsDNA target (SEQ ID NO: 150). Bound dsDNA and unbound dsDNA bands are indicated.

[0439] FIG. 3B is a DNA EMSA gel showing the ability of RNPs prepared with a) wild-type Cas12i2 (SEQ ID NO: 2), variant Cas12i2 of SEQ ID NO: 3, or variant Cas12i2 of SEQ ID NO: 4 and b) crRNA 2 (SEQ ID NO: 148) to bind a VEGFA dsDNA target (SEQ ID NO: 151). Bound dsDNA and unbound dsDNA bands are indicated.

[0440] FIG. 3C is a DNA EMSA gel showing the ability of RNPs prepared with a) wild-type Cas12i2 (SEQ ID NO: 2), variant Cas12i2 of SEQ ID NO: 3, or variant Cas12i2 of SEQ ID NO: 4 and b) crRNA 3 (SEQ ID NO: 149) to bind an EMX1 dsDNA target (SEQ ID NO: 152). Bound dsDNA and unbound dsDNA bands are indicated.

[0441] FIG. 3D is a DNA EMSA gel showing the ability of RNPs prepared with a) wild-type Cas12i2 (SEQ ID NO: 2), variant Cas12i2 of SEQ ID NO: 3, or variant Cas12i2 of SEQ ID NO: 4 and b) crRNA 1 (SEQ ID NO: 147) to bind an EMX1 dsDNA target (SEQ ID NO: 152). Unbound dsDNA bands are indicated.

[0442] FIG. 3E is a gel showing migration of samples comprising a) crRNA 1 (SEQ ID NO: 147) and DNA target 1 (SEQ ID NO: 150), b) crRNA 2 (SEQ ID NO: 148) and DNA target 2 (SEQ ID NO: 151), c) crRNA 3 (SEQ ID NO: 149) and DNA target 3 (SEQ ID NO: 152), and d) crRNA 1 (SEQ ID NO: 147) and DNA target 3 (SEQ ID NO: 152).

[0443] FIG. 4 is a schematic of the fluorescence depletion assay described in Example 10 to measure variant Cas12i2 activity.

[0444] FIG. 5A-5T are graphs of GFP Depletion Ratios (Non-target/target) for wild-type Cas12i2 (solid line), variant Cas12i2 of SEQ ID NO: 3 (dotted line), and variant Cas12i2 of SEQ ID NO: 4 (dashed line). The Depletion Ratio values were calculated from measurements taken over a period of 12 hours. Twenty GFP targets are shown: top1 (FIG. 5A), top2 (FIG. 5B), top3 (FIG. 5C), top4 (FIG. 5D), top5 (FIG. 5E), top6 (FIG. 5F), top7 (FIG. 5G), top8 (FIG. 5H), top9 (FIG. 5I), top10 (FIG. 5J), bot1 (FIG. 5K), bot2 (FIG. 5L), bot3 (FIG. 5M), bot4 (FIG. 5N), bot5 (FIG. 5O), bot6 (FIG. 5P), bot7 (FIG. 5Q), bot8 (FIG. 5R), bot9 (FIG. 5S), bot10 (FIG. 5T).

[0445] FIG. 6A shows indel measurements of fifteen genetic regions targeted with wild-type Cas12i2, variant Cas12i2 of SEQ ID NO:3, or variant Cas12i2 of SEQ ID NO:4, as assessed by Next Generation Sequencing. FIG. 6B shows the fraction of fifteen genetic regions found to be capable of being targeted with wild-type Cas12i2, variant Cas12i2 of SEQ ID NO:3, or variant Cas12i2 of SEQ ID NO:4, using the data of FIG. 6A.

[0446] FIG. 7A compares indel rates on an AAVS1 target using wild-type Cas12i2 (SEQ ID NO: 2) or Cas12i2 variants of SEQ ID NOs: 3-5, 495, or 496, 46, 47, 50-63, 65-68, 79, 84, 87-90, 95-97, 99, 101, 103, 104, 112, 114-118, 123, 130, and 131. FIG. 7B compares indel rates on an EMX1 target using wild-type Cas12i2 or Cas12i2 variants of SEQ ID NOs: 3-5, 495, or 496, 46, 47, 50-63, 65-68, 76, 79, 84, 86-90, 95-97, 99, 101, 103, 104, 112, and 114-124. FIG. 7C compares indel rates on an VEGFA1 target using wild-type Cas12i2 or Cas12i2 variants of SEQ ID NOs: 3-5, 495, or 496, 46, 47, 50-63, 65-68, 76, 79, 84, 86-90, 95-97, 99, 101, 103, 104, 112, and 114-124.

[0447] FIG. 8 shows indel activity by variant binary complexes comprising variant Cas12i2 of SEQ ID NO: 4 and several individual crRNAs targeting B2M at various concentrations in primary T cells. Error bars represent standard deviation of the mean of four technical replicates from one representative donor.

[0448] FIG. 9 shows B2M expression reduction by variant binary complexes comprising variant Cas12i2 of SEQ ID NO: 4 and several individual crRNAs targeting B2M at various concentrations in primary T cells. Error bars represent standard deviation of the mean of four technical replicates from one representative donor.

[0449] FIG. 10 shows viability of cells (via DAPI staining) seven days following introduction of variant Cas12i2 RNPs targeting B2M at various concentrations in primary T cells. Error bars represent standard deviation of the mean of four technical replicates from one representative donor.

[0450] FIG. 11A indel activity by variant binary complexes comprising variant Cas12i2 of SEQ ID NO: 4 and several individual crRNAs targeting TRAC at various concentrations in primary T cells. Error bars represent standard deviation of the mean of four technical replicates from one representative donor.

[0451] FIG. 11B shows viability of cells (via DAPI staining) seven days following introduction of variant Cas12i2 RNPs targeting TRAC at various concentrations in primary T cells. Error bars represent standard deviation of the mean of four technical replicates from one representative donor.

[0452] FIG. 12A shows indel activity by variant binary complexes comprising variant Cas12i2 of SEQ ID NO: 4 and several individual crRNAs targeting PDCD1 at various concentrations in primary T cells. Error bars represent standard deviation of the mean of four technical replicates from one representative donor.

[0453] FIG. 12B shows viability of cells (via DAPI staining) seven days following introduction of variant Cas12i2 RNPs targeting PDCD1 at various concentrations in primary T cells. Error bars represent standard deviation of the mean of four technical replicates from one representative donor.

[0454] FIG. 13 is a schematic showing how Levenshtein distances (edit distances) are calculated using exemplary on-target and non-target sequences. An on-target sequence and four non-target sequences are shown, each having an edit distance of 1, 2, 3, or 4. Each substituted, inserted, or deleted residue is indicated in bold. The PAM sequence for the target sequence and each non-target sequence is indicated to the left of the dotted line.

[0455] FIG. 14A shows on-target indel percentages on eight AAVS1 loci, eight EMX1 loci, and eight VEGFA loci using the Cas12i2 variant of SEQ ID NO: 3 and further shows off-target indel percentages on loci having an edit distance of 1, 2, 3, or 4 as compared to the target loci. FIG. 14B shows on-target indel percentages on eight AAVS1 loci, eight EMX1 loci, and eight VEGFA loci using the Cas12i2 variant of SEQ ID NO: 4 and further shows off-target indel percentages on loci having an edit distance of 1, 2, 3, or 4 as compared to the target loci. FIG. 14C shows on-target indel rates on eight AAVS1 loci, eight EMX1 loci, and eight VEGFA loci using the Cas12i2 variant of SEQ ID NO: 5 and further shows off-target indel rates on loci having an edit distance of 1, 2, 3, or 4 as compared to the target loci.

[0456] FIG. 15 is a schematic showing steps of the tagmentation-based tag integration site sequencing (TTISS) method used to analyze Cas12i2 variant specificity and activity in Example 16.

[0457] FIG. 16A shows on-target and off-target reads for variant Cas12i2 of SEQ ID NO: 4 and SpCas9 at the target AAVS1_T5. FIG. 16B shows on-target and off-target reads for variant Cas12i2 of SEQ ID NO: 4 and SpCas9 at the target EMX1_T2. FIG. 16C shows on-target and off-target reads for variant Cas12i2 of SEQ ID NO: 4 and SpCas9 at the target EMX1_T4. FIG. 16D shows on-target and off-target reads for variant Cas12i2 of SEQ ID NO: 4 and SpCas9 at the target VEGFA_T6.

[0458] FIG. 17A is a graph showing indels induced in EMX1_T6 and VEGFA_T7 by several engineered Cas12i2 variants.

[0459] FIG. 17B is a graph showing indels induced in EMX1_T6 and VEGFA_T7 by the Cas12i2 variants of SEQ ID NOs: 3-5 and 495.

[0460] FIG. 18 is a graph showing indels induced in AAVS1_T6, AAVS1_T7, EMX1_T2, EMX1_T6, and VEGFA_T5 by the Cas12i2 variants of SEQ ID NOs: 4, 495, and 496.

[0461] FIG. 19 is a schematic showing the domain structure of the Cas12i2 polypeptide.

[0462] FIG. 20A depicts the location of the D581R substitution in the Cas12i2 structure. The D581R substitution can form an electrostatic contact with DNA at the PAM sequence. D581R can interact with the non-target strand.

[0463] FIG. 20B depicts the locations of the I926R and V1030G substitutions in the Cas12i2 structure, which are close to the active site. I926R can interact with single-stranded DNA near the active site and stabilizes the interface with Rec1. V1030G is at the C-terminal portion of the structure.

[0464] FIG. 20C depicts direct repeat stabilization of unpaired and non-stacking bases. The direct repeat sequence interacts with Cas12i2 over a large area. Additionally, some RNA guide bases pair with one another. However, some bases are left exposed (stars), e.g., the exposed bases do not pair with other bases and do not have many interactions with Cas12i2. Substitutions that increase interactions between Cas12i2 and the RNA guide, especially at the exposed regions, can stabilize the binary complex and increase enzymatic activity.

[0465] FIG. 21A is a schematic showing ternary complex formation. Double-stranded DNA downstream of the PAM melts, and the spacer of an RNA guide binds to the target strand, forming a heteroduplex. The PAM sequence remains as intact double-stranded DNA, resulting in partial exposure of the terminal PAM double-stranded DNA base pair to the environment and the protein. The terminal base pair of the heteroduplex is also exposed. The exposed bases are indicated as the “heteroduplex end” and the “dsDNA duplex end.”

[0466] FIG. 21B shows exposed bases at the site of DNA melting and heteroduplex annealing in the Cas12i2 structure. Substitutions are described herein to stabilize the ends of the double-stranded DNA duplex and the heteroduplex. These substitutions can lower the energy barrier to initial target unwinding.

[0467] FIG. 22A shows conformational changes required for the binary complex to ternary complex transition. Most changes in Ca position between the binary and ternary structures occur in Helical II domain. Vectors show Ca movement ≥3.0 Å, ˜25° rotation of Helical II around axis. Substitutions are described herein to enhance ternary complex formation.

[0468] FIG. 22B shows regions in the Helical II domain where substitutions can increase Helical II domain flexibility. FIG. 22B further shows regions in the Cas12i2 structure where substitutions can stabilize the interface between the Helical II domain and the Nuc domain.

### DETAILED DESCRIPTION

[0469] The present disclosure relates to novel variants of the effector of SEQ ID NO: 2 and methods of production and use thereof. The present disclosure further relates to complexes comprising a variant of the effector of SEQ ID NO: 2 and methods of production and use thereof. In some aspects, a composition comprising a complex having one or more characteristics is described herein. In some aspects, a method of delivering a composition comprising the complex is described.

### Compositions

[0470] In some aspects, the invention described herein comprises compositions comprising a complex (e.g., a binary complex). In some aspects, the invention described herein comprises compositions comprising a complex comprising a Cas12i2 polypeptide and a targeting moiety. In some embodiments, a composition of the invention includes a variant Cas12i2 polypeptide and an RNA guide, and the variant Cas12i2 polypeptide has increased complex formation with the RNA guide as compared to a parent polypeptide.

[0471] In some aspects, a composition of the invention includes a complex comprising a variant Cas12i2 polypeptide and an RNA guide, wherein the Cas12i2 variant polypeptide and the RNA guide have a greater binding affinity, as compared to a parent polypeptide and the RNA guide.

[0472] In some aspects, a composition of the invention includes a complex comprising a variant Cas12i2 polypeptide and an RNA guide, wherein the Cas12i2 variant polypeptide and the RNA guide have stronger protein-RNA interactions, as compared to a parent polypeptide and the RNA guide. In some embodiments, the protein-RNA interactions are ionic interactions.

[0473] In some aspects, a composition of the invention includes a complex comprising a variant Cas12i2 polypeptide and an RNA guide, wherein the complex is more stable than a complex formed by a parent polypeptide and the RNA guide.

[0474] In some aspects, the invention described herein comprises compositions comprising a complex (e.g., a ternary complex). In some embodiments, a composition of the invention includes a variant Cas12i2 polypeptide, an RNA guide, and a target nucleic acid, and the variant Cas12i2 polypeptide has increased complex formation (e.g., ternary complex formation) with the RNA guide and target nucleic acid, as compared to a parent polypeptide.

[0475] In some aspects, a composition of the invention includes a binary complex comprising a variant Cas12i2 polypeptide and an RNA guide, and the composition further comprises a target nucleic acid. In some embodiments, the binary complex has increased ternary complex formation with the target nucleic acid, as compared to a parent binary complex.

[0476] In some aspects, a composition of the invention includes a variant Cas12i2 polypeptide, an RNA guide, and a target nucleic acid, wherein the Cas12i2 variant polypeptide and the RNA guide have a greater binding affinity to the target nucleic acid, as compared to a parent polypeptide and RNA guide.

[0477] In some aspects, a composition of the invention includes a binary complex comprising a variant Cas12i2 polypeptide and an RNA guide, and the composition further comprises a target nucleic acid. In some embodiments, the binary complex has a greater binding affinity to the target nucleic acid, as compared to a parent binary complex.

[0478] In some aspects, a composition of the invention includes a ternary complex comprising a variant Cas12i2 polypeptide, an RNA guide, and a target nucleic acid, wherein the ternary complex is more stable than a complex formed by a parent polypeptide, RNA guide, and target nucleic acid.

[0479] In some aspects, a composition of the invention includes a binary complex comprising a variant Cas12i2 polypeptide and an RNA guide, and the composition further comprises a target nucleic acid. In some embodiments, the binary complex forms a more stable ternary complex with the target nucleic acid than a ternary complex formed by a parent binary complex and target nucleic acid.

[0480] In some aspects, the invention described herein comprises compositions comprising a complex (e.g., a ternary complex). In some embodiments, a composition of the invention includes a variant Cas12i2 polypeptide, an RNA guide, and a target nucleic acid, and the variant Cas12i2 polypeptide and RNA guide form a variant binary complex having greater binding affinity to the target nucleic acid, as compared to a parent binary complex.

[0481] In some aspects, a composition of the invention includes a binary complex comprising a variant Cas12i2 polypeptide and an RNA guide, and the composition further comprises a target nucleic acid. In some embodiments, the binary complex has greater target binding affinity to a target locus of the target nucleic acid, as compared to a parent binary complex.

[0482] In some aspects, a composition of the invention includes a plurality of variant Cas12i2 polypeptides and two or more distinct RNA guides. In some embodiments, the distinct RNA guides individually form variant binary complexes with separate variant Cas12i2 polypeptides, and the variant binary complexes have greater on-target binding of two or more target loci of a target nucleic acid, as compared to parent binary complexes.

[0483] In some aspects, a composition of the invention includes a plurality of variant Cas12i2 polypeptides and two or more distinct RNA guides. In some embodiments, the distinct RNA guides individually form variant binary complexes with separate variant Cas12i2 polypeptides, and the variant binary complexes have greater on-target ternary complex formation with two or more target loci of a target nucleic acid, as compared to parent binary complexes.

[0484] In some aspects, a composition of the invention includes a plurality of variant Cas12i2 polypeptides and two or more distinct RNA guides. In some embodiments, the distinct RNA guides individually form variant binary complexes with separate variant Cas12i2 polypeptides, and the variant binary complexes form more stable ternary complexes with two or more target loci of a target nucleic acid, as compared to parent binary complexes.

[0485] In some aspects, the invention described herein comprises compositions comprising a complex. In some embodiments, the invention comprises a binary complex comprising a variant Cas12i2 polypeptide and an RNA guide.

[0486] In some embodiments, the invention comprises a ternary complex comprising a variant Cas12i2 polypeptide, an RNA guide, and a target locus of a target nucleic acid. In some embodiments, a composition of the invention comprises a plurality of variant Cas12i2 polypeptides and two or more distinct RNA guides, and the distinct RNA guides individually form variant binary complexes with separate variant Cas12i2 polypeptides.

[0487] In some aspects, a composition of the invention includes a variant Cas12i2 polypeptide and an RNA guide, and the variant Cas12i2 polypeptide and RNA guide form a variant binary complex having higher on-target binding affinity to a target locus of a target nucleic acid, as compared to a parent binary complex. In some embodiments, a composition of the invention includes a plurality of variant binary complexes having higher on-target binding to two or more target loci of a target nucleic acid, as compared to a plurality of parent binary complexes.

[0488] In some aspects, a composition of the invention includes a binary complex comprising a variant Cas12i2 polypeptide and RNA guide, and the binary complex has a lower binding affinity to a non-target locus of a target nucleic acid, as compared to a parent binary complex. In some embodiments, a composition of the invention includes a plurality of variant binary complexes having lower off-target binding to two or more non-target loci of a target nucleic acid, as compared to a plurality of parent binary complexes.

[0489] In some aspects, a composition of the invention includes a binary complex comprising a variant Cas12i2 polypeptide and an RNA guide, and the binary complex has higher activity at an on-target locus of a target nucleic acid, as compared to a parent binary complex. In some embodiments, a composition of the invention includes a plurality of variant binary complexes having higher on-target activity at two or more target loci of a target nucleic acid, as compared to a plurality of parent binary complexes.

[0490] In some aspects, a composition of the invention includes a binary complex comprising a variant Cas12i2 polypeptide and an RNA guide, and the binary complex has lower activity at a non-target locus of a target nucleic acid, as compared to a parent binary complex. In some embodiments, a composition of the invention includes a plurality of variant binary complexes having lower off-target activity at two or more non-target loci of a target nucleic acid, as compared to a plurality of parent binary complexes.

### Variant Cas12i2 Polypeptide

[0491] In some embodiments, the composition of the present invention includes a variant Cas12i2 polypeptide described herein.

[0492] In some embodiments, the polypeptide of the present invention is a variant of a parent polypeptide, wherein the parent is encoded by a polynucleotide that comprises a nucleotide sequence such as SEQ ID NO: 1 or comprises an amino acid sequence such as SEQ ID NO: 2.

TABLE 1
Parent sequences.

| SEQ ID | | |
|---|---|---|
| NO | Sequence | Description |
| 1 | ATGAGCAGCGCGATCAAAAGCTACAAGAGCGTTCTGCGTCCGAACGA | Nucleotide |
| | GCGTAAGAACCAACTGCTGAAAAGCACCATTCAGTGCCTGGAAGACG | sequence |
| | GTAGCGCGTTCTTTTTCAAGATGCTGCAAGGCCTGITTGGTGGCATC | encoding |
| | ACCCCGGAGATTGTTCGTTTCAGCACCGAACAGGAGAAACAGCAACA | parent |
| | GGATATCGCGCTGTGGTGCGCGGTTAACTGGTTCCGTCCGGTGAGCC | polypeptide |
| | AAGACAGCCTGACCCACACCATTGCGAGCGATAACCTGGTGGAGAAG | |
| | TTTGAGGAATACTATGGTGGCACCGCGAGCGACGCGATCAAACAGTA | |
| | CTTCAGCGCGAGCATTGGCGAAAGCTACTATTGGAACGACTGCCGTC | |
| | AACAGTACTATGATCTGTGCCGTGAGCTGGGTGTTGAGGTGAGCGAC | |
| | CTGACCCATGATCTGGAGATCCIGTGCCGTGAAAAGTGCCTGGCGGT | |
| | TGCGACCGAGAGCAACCAGAACAACAGCATCATTAGCGTTCTGTTTG | |
| | GCACCGGCGAAAAAGAGGACCGTAGCGTGAAACTGCGTATCACCAAG | |
| | AAAATTCTGGAGGCGATCAGCAACCTGAAAGAAATCCCGAAGAACGT | |
| | TGCGCCGATTCAAGAGATCATTCTGAACGTGGCGAAAGCGACCAAGG | |
| | AAACCTTCCGTCAGGTGTATGCGGGTAACCTGGGTGCGCCGAGCACC | |
| | CTGGAGAAATTTATCGCGAAGGACGGCCAAAAAGAGTTCGATCTGAA | |
| | GAAACTGCAGACCGACCTGAAGAAAGTTATTCGTGGTAAAAGCAAGG | |
| | AGCGTGATTGGTGCTGCCAGGAAGAGCTGCGTAGCTACGTGGAGCAA | |
| | AACACCATCCAGTATGACCTGTGGGCGTGGGGCGAAATGTTCAACAA | |
| | AGCGCACACCGCGCTGAAAATCAAGAGCACCCGTAACTACAACTTTG | |
| | CGAAGCAACGTCTGGAACAGTTCAAAGAGATTCAGAGCCTGAACAAC | |
| | CTGCTGGTTGTGAAGAAGCTGAACGACTTTTTCGATAGCGAATTTTT | |
| | CAGCGGCGAGGAAACCTACACCATCTGCGTTCACCATCTGGGTGGCA | |
| | AGGACCTGAGCAAACTGTATAAGGCGTGGGAGGATGATCCGGCGGAC | |
| | CCGGAAAACGCGATTGTGGTTCTGTGCGACGATCTGAAAAACAACTT | |
| | TAAGAAAGAGCCGATCCGTAACATTCTGCGTTACATCTTCACCATTC | |
| | GTCAAGAATGCAGCGCGCAGGACATCCTGGCGGCGGCGAAGTACAAC | |
| | CAACAGCTGGATCGTTATAAAAGCCAAAAGGCGAACCCGAGCGTTCT | |
| | GGGTAACCAGGGCTTTACCTGGACCAACGCGGTGATCCTGCCGGAGA | |
| | AGGCGCAGCGTAACGACCGTCCGAACAGCCTGGATCTGCGTATTTGG | |
| | CTGTACCTGAAACTGCGTCACCCGGACGGTCGTTGGAAGAAACACCA | |
| | TATCCCGTTCTACGATACCCGTTTCTTCCAAGAAATTTATGCGGCGG | |
| | GCAACAGCCCGGTTGACACCTGCCAGTTTCGTACCCCGCGTTTCGGT | |
| | TATCACCTGCCGAAACTGACCGATCAGACCGCGATCCGTGTTAACAA | |
| | GAAACATGTGAAAGCGGCGAAGACCGAGGCGCGTATTCGTCTGGCGA | |
| | TCCAACAGGGCACCCTGCCGGTGAGCAACCTGAAGATCACCGAAATT | |
| | AGCGCGACCATCAACAGCAAAGGTCAAGTGCGTATTCCGGTTAAGTT | |
| | TGACGTGGGTCGTCAAAAAGGCACCCTGCAGATCGGTGACCGTTTCT | |
| | GCGGCTACGATCAAAACCAGACCGCGAGCCACGCGTATAGCCTGTGG | |
| | GAAGTGGTTAAAGAGGGTCAATACCATAAAGAGCTGGGCTGCTTTGT | |
| | TCGTTTCATCAGCAGCGGTGACATCGTGAGCATTACCGAGAACCGTG | |
| | GCAACCAATTTGATCAGCTGAGCTATGAAGGTCTGGCGTACCCGCAA | |
| | TATGCGGACTGGCGTAAGAAAGCGAGCAAGTTCGTGAGCCTGTGGCA | |
| | GATCACCAAGAAAAACAAGAAAAAGGAAATCGTGACCGTTGAAGCGA | |
| | AAGAGAAGTTTGACGCGATCTGCAAGTACCAGCCGCGTCTGTATAAA | |
| | TTCAACAAGGAGTACGCGTATCTGCTGCGTGATATTGTTCGTGGCAA | |
| | AAGCCTGGTGGAACTGCAACAGATTCGTCAAGAGATCTTTCGTTTCA | |
| | TTGAACAGGACTGCGGTGTTACCCGTCTGGGCAGCCTGAGCCTGAGC | |
| | ACCCTGGAAACCGTGAAAGCGGTTAAGGGTATCATTTACAGCTATTT | |
| | TAGCACCGCGCTGAACGCGAGCAAGAACAACCCGATCAGCGACGAAC | |
| | AGCGTAAAGAGTTTGATCCGGAACTGTTCGCGCTGCTGGAAAAGCTG | |
| | GAGCTGATTCGTACCCGTAAAAAGAAACAAAAAGTGGAACGTATCGC | |
| | GAACAGCCTGATTCAGACCTGCCTGGAGAACAACATCAAGTTCATTC | |
| | GTGGTGAAGGCGACCTGAGCACCACCAACAACGCGACCAAGAAAAAG | |
| | GCGAACAGCCGTAGCATGGATTGGTTGGCGCGTGGTGTTTTTAACAA | |
| | AATCCGTCAACTGGCGCCGATGCACAACATTACCCTGTTCGGTTGCG | |
| | GCAGCCTGTACACCAGCCACCAGGACCCGCTGGTGCATCGTAACCCG | |
| | GATAAAGCGATGAAGTGCCGTTGGGCGGCGATCCCGGTTAAGGACAT | |
| | TGGCGATTGGGTGCTGCGTAAGCTGAGCCAAAACCTGCGTGCGAAAA | |
| | ACATCGGCACCGGCGAGTACTATCACCAAGGTGTTAAAGAGTTCCTG | |
| | AGCCATTATGAACTGCAGGACCTGGAGGAAGAGCTGCTGAAGTGGCG | |
| | TAGCGATCGTAAAAGCAACATTCCGTGCTGGGTGCTGCAGAACCGTC | |
| | TGGCGGAGAAGCTGGGCAACAAAGAAGCGGTGGTTTACATCCCGGTT | |
| | CGTGGTGGCCGTATTTATTTTGCGACCCACAAGGTGGCGACCGGTGC | |
| | GGTGAGCATCGTTTTCGACCAAAAACAAGTGTGGGTTTGCAACGCGG | |
| | ATCATGTTGCGGCGGCGAACATCGCGCTGACCGTGAAGGGTATTGGC | |
| | GAACAAAGCAGCGACGAAGAGAACCCGGATGGTAGCCGTATCAAACT | |
| | GCAGCTGACCAGC | |
| 2 | MSSAIKSYKSVLRPNERKNOLLKSTIQCLEDGSAFFFKMLQGLFGGI | Parent |
| | TPEIVRFSTEQEKQQQDIALWCAVNWFRPVSQDSLTHTIASDNLVEK | polypeptide |
| | FEEYYGGTASDAIKQYFSASIGESYYWNDCRQQYYDLCRELGVEVSD | |
| | LTHDLEILCREKCLAVATESNQNNSIISVLFGTGEKEDRSVKLRITK | |
| | KILEAISNLKEIPKNVAPIQEIILNVAKATKETFRQVYAGNLGAPST | |
| | LEKFIAKDGQKEFDLKKLQTDLKKVIRGKSKERDWCCQEELRSYVEQ | |
| | NTIQYDLWAWGEMFNKAHTALKIKSTRNYNFAKQRLEQFKEIQSLNN | |
| | LLVVKKLNDFFDSEFFSGEETYTICVHHLGGKDLSKLYKAWEDDPAD | |
| | PENAIVVLCDDLKNNFKKEPIRNILRYIFTIRQECSAQDILAAAKYN | |
| | QQLDRYKSQKANPSVLGNQGFTWTNAVILPEKAQRNDRPNSLDLRIW | |
| | LYLKLRHPDGRWKKHHIPFYDTRFFQEIYAAGNSPVDTCQFRTPRFG | |
| | YHLPKLTDQTAIRVNKKHVKAAKTEARIRLAIQQGTLPVSNLKITEI | |
| | SATINSKGQVRIPVKFDVGRQKGTLQIGDRFCGYDQNQTASHAYSLW | |
| | EVVKEGQYHKELGCFVRFISSGDIVSITENRGNQFDQLSYEGLAYPQ | |
| | YADWRKKASKFVSLWQITKKNKKKEIVTVEAKEKFDAICKYQPRLYK | |
| | FNKEYAYLLRDIVRGKSLVELQQIRQEIFRFIEQDCGVTRLGSLSLS | |
| | TLETVKAVKGIIYSYFSTALNASKNNPISDEQRKEFDPELFALLEKL | |
| | ELIRTRKKKQKVERIANSLIQTCLENNIKFIRGEGDLSTTNNATKKK | |
| | ANSRSMDWLARGVFNKIRQLAPMHNITLFGCGSLYTSHQDPLVHRNP | |
| | DKAMKCRWAAIPVKDIGDWVLRKLSQNLRAKNIGTGEYYHQGVKEFL | |
| | SHYELQDLEEELLKWRSDRKSNIPCWVLQNRLAEKLGNKEAVVYIPV | |
| | RGGRIYFATHKVATGAVSIVFDQKQVWVCNADHVAAANIALTVKGIG | |
| | EQSSDEENPDGSRIKLQLTS | |

[0493] In an aspect of the invention, a variant polypeptide sequence includes one or more variations.

[0494] A nucleic acid sequence encoding the parent polypeptide described herein may be substantially identical to a reference nucleic acid sequence, e.g., SEQ ID NO: 1. In some embodiments, the variant Cas12i2 polypeptide is encoded by a nucleic acid comprising a sequence having least about 60%, at least about 65%, at least about 70%, at least about 75%, at least about 80%, at least about 85%, at least about 90%, at least about 91%, at least about 92%, at least about 93%, at least about 94%, at least about 95%, at least about 96%, at least about 97%, at least about 98%, at least about 99%, or at least about 99.5% sequence identity to the reference nucleic acid sequence, e.g., nucleic acid sequence encoding the parent polypeptide, e.g., SEQ ID NO: 1. The percent identity between two such nucleic acids can be determined manually by inspection of the two optimally aligned nucleic acid sequences or by using software programs or algorithms (e.g., BLAST, ALIGN, CLUSTAL) using standard parameters. One indication that two nucleic acid sequences are substantially identical is that the nucleic acid molecules hybridize to the complementary sequence of the other under stringent conditions (e.g., within a range of medium to high stringency).

[0495] In some embodiments, the variant Cas12i2 polypeptide is encoded by a nucleic acid sequence having at least about 60%, at least about 65%, at least about 70%, at least about 75%, at least about 80%, at least about 85%, at least about 90%, at least about 91%, at least about 92%, at least about 93%, at least about 94%, at least about 95%, at least about 96%, at least about 97%, at least about 98%, at least about 99%, or more sequence identity, but not 100% sequence identity, to a reference nucleic acid sequence, e.g., nucleic acid sequence encoding the parent polypeptide, e.g., SEQ ID NO: 1.

[0496] In some embodiments, the variant Cas12i2 polypeptide of the present invention comprises a polypeptide sequence having 50%, 60%, 65%, 70%, 75%, 80%, 85%, 90%, 91%, 92%, 93%, 94%, 95%, 96%, 97%, 98%, or 99%, but not 100%, identity to SEQ ID NO: 2. In some embodiments, the variant Cas12i2 polypeptide of the present invention comprises a polypeptide sequence having greater than 50%, 60%, 65%, 70%, 75%, 80%, 85%, 90%, 91%, 92%, 93%, 94%, 95%, 96%, 97%, 98%, or 99%, but not 100%, identity to SEQ ID NO: 2.

[0497] In some embodiments, the present invention describes a variant Cas12i2 polypeptide having a specified degree of amino acid sequence identity to one or more reference polypeptides, e.g., a parent polypeptide, e.g., at least 60%, at least 65%, at least 70%, at least 75%, at least 80%, at least 85%, at least 90%, at least 91%, at least 92%, at least 93%, at least 94%, at least 95%, at least 96%, at least 97%, at least 98%, or even at least 99%, but not 100%, sequence identity to the amino acid sequence of SEQ ID NO: 2. Homology or identity can be determined by amino acid sequence alignment, e.g., using a program such as BLAST, ALIGN, or CLUSTAL, as described herein.

[0498] In some embodiments, the variant Cas12i2 polypeptide comprises an alteration at one or more (e.g., several) amino acids of a parent polypeptide, wherein at least 1, 2, 3, 4, 5, 6, 7, 8, 9, 10, 11, 12, 13, 14, 15, 16, 17, 18, 19, 20, 21, 22, 23, 24, 25, 26, 27, 28, 29, 30, 31, 32, 33, 34, 35, 36, 37, 38, 39, 40, 41, 42, 43, 44, 45, 46, 47, 48, 49, 50, 51, 52, 53, 54, 55, 56, 57, 58, 59, 60, 61, 62, 63, 64, 65, 66, 67, 68, 69, 70, 71, 72, 73, 74, 75, 76, 77, 78, 79, 80, 81, 82, 83, 84, 85, 86, 87, 88, 89, 90, 91, 92, 93, 94, 95, 96, 97, 98, 99, 100, 101, 102, 103, 104, 105, 106, 107, 108, 109, 110, 111, 112, 113, 114, 115, 116, 117, 118, 119, 120, 121, 122, 123, 124, 125, 126, 127, 128, 129, 130, 131, 132, 133, 134, 135, 136, 137, 138, 139, 140, 141, 142, 143, 144, 145, 146, 147, 148, 149, 150, 151, 152, 153, 154, 155, 156, 157, 158, 159, 160, 161, 162, 162, 164, 164, 165, 166, 167, 168, 169, 170, 171, 172, 173, 174, 175, 176, 177, 178, 179, 180, 181, 182, 183, 184, 185, 186, 187, 188, 189, 190, 191, 193, 194, 195, 196, 197, 198, 199, 200, or more are altered.

[0499] In some embodiments, the variant Cas12i2 polypeptide comprises one or more of the amino acid substitutions listed in Table 2. In some embodiments, the variant Cas12i2 polypeptide comprises at least one of a D581, G624, F626, D835, L836, P868, S879, D911, 1926, V1020, V1030, E1035, and S1046 substitution. In some embodiments, the variant Cas12i2 polypeptide comprises at least one of a D581R, G624R, F626R, D835R, L836R, P868R, S879R, D911R, 1926R, V1020R, V1030R, E1035R, and 51046R substitution. In some embodiments, the variant Cas12i2 polypeptide comprises at least one of a D581G, F626G, D835G, L836G, P868G, S879G, D911G, 1926G, V1020G, V1030G, E1035G, and 51046G substitution. In some embodiments, the variant Cas12i2 polypeptide comprises at least one of a D581R, G624R, F626R, D835R, L836R, P868T, S879R, D911R, 1926R, V1020G, V1030G, E1035R, and 51046G substitution and at least one additional substitution listed in Table 2. In some embodiments, the variant Cas12i2 polypeptide comprises any one of SEQ ID NOs: 3-146 and 495-512. In some embodiments, the variant Cas12i2 polypeptide comprises any one of SEQ ID NOs: 3-146 and 495-512 and at least one additional substitution listed in Table 2. In some embodiments, the variant Cas12i2 polypeptide comprises the amino acid sequence of SEQ ID NO: 3. In some embodiments, the variant Cas12i2 polypeptide comprises the amino acid sequence of SEQ ID NO: 4. In some embodiments, the variant Cas12i2 polypeptide comprises the amino acid sequence of SEQ ID NO: 5. In some embodiments, the variant Cas12i2 polypeptide comprises the amino acid sequence of SEQ ID NO: 495. In some embodiments, the variant Cas12i2 polypeptide comprises the amino acid sequence of SEQ ID NO: 496.

TABLE 2
TABLE 2. Single amino acid substitutions
in variant Cas12i2 polypeptide.

| | Wild-Type | |
|---|---|---|
| Position | Residue | Substitution(s) |
| 1 | M | |
| 2 | S | R, G, A, K, Q, N, H |
| 3 | S | R, G, A, K, Q, N, H |
| 4 | A | R, G, K, Q, N, H |
| 5 | I | R, G, A, K, Q, N, H, W, F, Y, M |
| 6 | K | R, G, A, Q, N, H |
| 7 | S | P, R, G, A, K, Q, N, H |
| 8 | Y | R, G, A, K, Q, N, H |
| 9 | K | R, G, A, Q, N, H |
| 10 | S | R, G, A, K, Q, N, H |
| 11 | V | R, K, G, A, Q, N, H |
| 12 | L | R, G, A, K, Q, N, H |
| 13 | R | A, G, K, Q, N, H |
| 14 | P | R, G, A, K, Q, N, H |
| 15 | N | R, D, G, A, K, Q, H |
| 16 | E | R, D, G, A, K, Q, N, H |
| 17 | R | G, A, K, Q, N, H |
| 18 | K | R, G, A, Q, N, H |
| 19 | N | R, G, A, K, Q, H |
| 20 | Q | R, K, G, A, N, H |
| 21 | L | R, M, G, A, K, Q, N, H |
| 22 | L | R, G, A, K, Q, N, H |
| 23 | K | R, N, G, A, Q, H |
| 24 | S | R, D, G, A, K, Q, N, H |
| 25 | T | R, G, A, K, Q, N, H |
| 26 | I | R, F, G, A, K, Q, N, H |
| 27 | Q | R, N, G, A, K, H |
| 28 | C | R, W, G, A, K, Q, N, H |
| 29 | L | R, G, A, K, Q, N, H |
| 30 | E | R, D, G, A, K, Q, N, H |
| 31 | D | R, G, A, K, Q, N, H |
| 32 | G | R, A, K, Q, N, H |
| 33 | S | R, G, A, K, Q, N, H |
| 34 | A | R, G, K, Q, N, H |
| 35 | F | R, V, G, A, K, Q, N, H |
| 36 | F | R, G, A, K, Q, N, H |
| 37 | F | R, G, A, K, Q, N, H |
| 38 | K | R, D, G, A, Q, N, H |
| 39 | M | R, G, A, K, Q, N, H |
| 40 | L | R, G, A, K, Q, N, H |
| 41 | Q | R, V, G, A, K, N, H |
| 42 | G | R, A, K, Q, N, H |
| 43 | L | R, G, A, K, Q, N, H |
| 44 | F | R, G, A, K, Q, N, H |
| 45 | G | R, A, K, Q, N, H |
| 46 | G | R, A, K, Q, N, H |
| 47 | I | R, G, A, K, Q, N, H |
| 48 | T | R, G, A, K, Q, N, H |
| 49 | P | R, H, G, A, K, Q, N |
| 50 | E | R, G, A, K, Q, N, H |
| 51 | I | R, G, A, K, Q, N, H |
| 52 | V | R, A, G, K, Q, N, H |
| 53 | R | G, A, K, Q, N, H |
| 54 | F | R, G, A, K, Q, N, H |
| 55 | S | R, G, A, K, Q, N, H |
| 56 | T | R, G, A, K, Q, N, H |
| 57 | E | R, G, A, K, Q, N, H |
| 58 | Q | R, G, A, K, N, H |
| 59 | E | R, G, A, K, Q, N, H |
| 60 | K | R, G, A, Q, N, H |
| 61 | Q | R, S, G, A, K, N, H |
| 62 | Q | R, K, G, A, K, N, H |
| 63 | Q | R, G, A, K, N, H |
| 64 | D | R, G, A, K, Q, N, H |
| 65 | I | R, G, A, K, Q, N, H |
| 66 | A | R, D, G, K, Q, N, H |
| 67 | L | R, G, A, K, Q, N, H |
| 68 | W | R, L, G, A, K, Q, N, H |
| 69 | C | R, G, A, K, Q, N, H |
| 70 | A | R, G, K, Q, N, H |
| 71 | V | R, I, G, A, K, Q, N, H |
| 72 | N | R, G, A, K, Q, H |
| 73 | W | R, G, A, K, Q, N, H |
| 74 | F | R, G, A, K, Q, N, H |
| 75 | R | G, A, K, Q, N, H |
| 76 | P | R, L, G, A, K, Q, N, H |
| 77 | V | R, G, A, K, Q, N, H |
| 78 | S | R, G, A, K, Q, N, H |
| 79 | Q | R, K, G, A, N, H |
| 80 | D | R, G, A, K, Q, N, H |
| 83 | S | R, G, A, K, Q, N, H |
| 82 | L | R, G, A, K, Q, N, H |
| 83 | T | R, G, A, K, Q, N, H |
| 84 | H | R, G, A, K, Q, N |
| 85 | T | R, G, A, K, Q, N, H |
| 86 | I | R, Q, G, A, K, N, H |
| 87 | A | R, T, G, K, Q, N, H |
| 88 | S | R, G, A, K, Q, N, H |
| 89 | D | R, E, G, A, K, Q, N, H |
| 90 | N | R, G, A, K, Q, H |
| 91 | L | R, G, A, K, Q, N, H |
| 92 | V | R, G, A, K, Q, N, H |
| 93 | E | R, G, A, K, Q, N, H |
| 94 | K | R, L, G, A, Q, N, H |
| 95 | F | R, G, A, K, Q, N, H |
| 96 | E | R, G, A, K, Q, N, H |
| 97 | E | R, G, A, K, Q, N, H |
| 98 | Y | R, G, A, K, Q, N, H |
| 99 | Y | R, S, G, A, K, Q, N, H |
| 100 | G | R, A, K, Q, N, H |
| 101 | G | R, H, A, K, Q, N |
| 102 | T | R, E, G, A, K, Q, N, H |
| 103 | A | R, P, G, K, Q, N, H |
| 104 | S | R, G, A, K, Q, N, H |
| 105 | D | R, S, G, A, K, Q, N, H |
| 106 | A | R, F, G, K, Q, N, H |
| 107 | I | R, G, A, K, Q, N, H |
| 108 | K | R, Q, G, A, N, H |
| 109 | Q | R, E, G, A, K, N, H |
| 110 | Y | R, G, A, K, Q, N, H |
| 111 | F | R, G, A, K, Q, N, H |
| 112 | S | R, G, A, K, Q, N, H |
| 113 | A | R, G, K, Q, N, H |
| 114 | S | R, N, G, A, K, Q, N, H |
| 115 | I | R, G, A, K, Q, N, H |
| 116 | G | R, D, A, K, Q, N, H |
| 117 | E | R, G, A, K, Q, N, H |
| 118 | S | R, K, G, A, K, Q, N, H |
| 119 | Y | R, G, A, K, Q, N, H |
| 120 | Y | R, G, A, K, Q, N, H |
| 121 | W | R, G, A, K, Q, N, H |
| 122 | N | R, V, G, A, K, Q, H |
| 123 | D | R, G, A, K, Q, N, H |
| 124 | C | R, G, A, K, Q, N, H |
| 125 | R | G, A, K, Q, N, H |
| 126 | Q | R, L, G, A, K, N, H |
| 127 | Q | R, G, A, K, N, H |
| 128 | Y | R, F, G, A, K, Q, N, H |
| 129 | Y | R, G, A, K, Q, N, H |
| 130 | D | R, G, A, K, Q, N, H |
| 131 | L | R, G, A, K, Q, N, H |
| 132 | C | R, A, G, K, Q, N, H |
| 133 | R | G, A, K, Q, N, H |
| 134 | E | R, N, G, A, K, Q, N, H |
| 135 | L | R, I, G, A, K, Q, N, H |
| 136 | G | R, A, K, Q, N, H |
| 137 | V | R, G, A, K, Q, N, H |
| 138 | E | R, S, G, A, K, Q, N, H |
| 139 | V | R, G, A, K, Q, N, H |
| 140 | S | R, G, A, K, Q, N, H |
| 141 | D | R, G, A, K, Q, N, H |
| 142 | L | R, G, A, K, Q, N, H |
| 143 | T | R, G, A, K, Q, N, H |
| 144 | H | R, G, A, K, Q, N |
| 145 | D | R, G, A, K, Q, N, H |
| 146 | L | R, A, G, K, Q, N, H |
| 147 | E | R, G, A, K, Q, N, H |
| 148 | I | R, T, G, A, K, Q, N, H |
| 149 | L | R, M, G, A, K, Q, N, H |
| 150 | C | R, G, A, K, Q, N, H |
| 151 | R | G, A, K, Q, N, H |
| 152 | E | R, G, A, K, Q, N, H |
| 153 | K | R, G, A, Q, N, H |
| 154 | C | R, L, G, A, K, Q, N, H |
| 155 | L | R, I, G, A, K, 2, N, H |
| 156 | A | R, P, G, K, Q, N, H |
| 157 | V | R, L, G, A, K, Q, N, H |
| 158 | A | R, G, K, Q, N, H |
| 159 | T | R, K, G, A, Q, N, H |
| 160 | E | R, D, G, A, K, Q, N, H, L |
| 161 | S | R, D, G, A, K, Q, N, H |
| 162 | N | R, F, G, A, K, Q, H |
| 163 | Q | R, N, G, A, K, H, M |
| 164 | N | R, A, G, K, Q, H, M, W, F |
| 165 | N | R, G, A, K, Q, H, M, P, F, Y, W |
| 166 | S | R, G, A, K, Q, N, H |
| 167 | I | R, G, A, K, Q, N, H |
| 168 | I | R, G, A, K, Q, N, H |
| 169 | S | R, G, A, K, Q, N, H |
| 170 | V | R, G, A, K, Q, N, H |
| 171 | L | R, G, A, K, Q, N, H |
| 172 | F | R, G, A, K, Q, N, H |
| 173 | G | R, A, K, Q, N, H, S |
| 174 | T | R, G, A, K, Q, N, H |
| 175 | G | R, A, K, Q, N, H |
| 176 | E | R, K, G, A, K, Q, N, H |
| 177 | K | R, G, A, Q, N, H |
| 178 | E | R, G, A, K, Q, N, H |
| 179 | D | R, G, A, K, Q, N, H |
| 180 | R | G, A, K, Q, N, H |
| 181 | S | R, G, A, K, Q, N, H |
| 182 | V | R, G, A, K, Q, N, H |
| 183 | K | R, G, A, Q, N, H |
| 184 | L | R, A, G, K, Q, N, H |
| 185 | R | G, A, K, Q, N, H |
| 186 | I | R, M, G, A, K, Q, N, H |
| 187 | T | R, L, G, A, K, Q, N, H |
| 188 | K | R, G, A, Q, N, H |
| 189 | K | R, G, A, Q, N, H |
| 190 | I | R, G, A, K, Q, N, H |
| 191 | L | R, S, G, A, K, Q, N, H |
| 192 | E | R, N, G, A, K, Q, H |
| 193 | A | R, G, K, Q, N, H |
| 194 | I | R, L, G, A, K, Q, N, H |
| 195 | S | R, G, A, K, Q, N, H |
| 196 | N | R, G, A, K, Q, H |
| 197 | L | R, G, A, K, Q, N, H |
| 198 | K | R, D, G, A, Q, N, H |
| 199 | E | R, K, G, A, Q, N, H |
| 200 | I | R, G, A, K, Q, N, H |
| 201 | P | R, G, A, K, Q, N, H |
| 202 | K | R, G, A, Q, N, H |
| 203 | N | R, T, G, A, K, Q, H |
| 204 | V | R, W, G, A, K, Q, N, H |
| 205 | A | R, E, G, K, Q, N, H |
| 206 | P | R, E, G, A, K, Q, N, H |
| 207 | I | R, Y, G, A, K, Q, N, H |
| 208 | Q | R, G, A, K, N, H |
| 209 | E | R, D, G, A, K, Q, N, H |
| 210 | I | R, L, G, A, K, Q, N, H |
| 211 | I | R, G, A, K, Q, N, H |
| 212 | L | R, G, A, K, Q, N, H |
| 213 | N | R, K, G, A, Q, H |
| 214 | V | R, G, A, K, Q, N, H |
| 215 | A | R, F, G, K, Q, N, H |
| 216 | K | R, G, A, Q, N, H |
| 217 | A | R, G, K, Q, N, H |
| 218 | T | R, G, A, K, Q, N, H |
| 219 | K | R, G, A, Q, N, H |
| 220 | E | R, G, A, K, Q, N, H |
| 221 | T | R, L, G, A, K, Q, N, H |
| 222 | F | R, K, G, A, Q, N, H |
| 223 | R | G, A, K, Q, N, H |
| 224 | Q | R, K, G, A, N, H |
| 225 | V | R, G, A, K, Q, N, H |
| 226 | Y | R, G, A, K, Q, N, H |
| 227 | A | R, G, K, Q, N, H |
| 228 | G | R, A, K, Q, N, H |
| 229 | N | R, S, G, A, K, Q, H |
| 230 | L | R, G, A, K, Q, N, H, S |
| 231 | G | R, A, K, Q, N, H |
| 232 | A | R, G, K, Q, N, H, S |
| 233 | P | R, G, A, K, Q. N, H, S |
| 234 | S | R, G, A, K, Q, N, H, P |
| 235 | T | R, S, G, A, K, Q, N, H |
| 236 | L | R, G, A, K, Q, N, H |
| 237 | E | R, V, G, A, K, Q, N, H, S |
| 238 | K | R, G, A, Q, N, H |
| 239 | F | R, D, G, A, K, Q, N, H |
| 240 | I | R, G, A, K, Q, N, H |
| 241 | A | R, K, G, Q, N, H |
| 242 | K | R, G, A, Q, N, H |
| 243 | D | R, G, A, K, Q, N, H |
| 244 | G | R, A, K, Q, N, H |
| 245 | Q | R, G, A, K, N, H |
| 246 | K | R, G, A, Q, N, H |
| 247 | E | R, G, A, K, Q, N, H |
| 248 | F | R, G, A, K, Q, N, H |
| 249 | D | R, G, A, K, Q, N, H |
| 250 | L | R, G, A, K, Q, N, H |
| 251 | K | R, G, A, Q, N, H |
| 252 | K | R, G, A, Q, N, H |
| 253 | L | R, G, A, K, Q, N, H |
| 254 | Q | R, I, G, A, K, N, H |
| 255 | T | R, G, A, K, Q, N, H |
| 256 | D | R, K, G, A, Q, N, H |
| 257 | L | R, F, G, A, K, Q, N, H |
| 258 | K | R, G, A, Q, N, H |
| 259 | K | R, G, A, Q, N, H |
| 260 | V | R, D, G, A, K, Q, N, H |
| 261 | I | R, A, G, K, Q, N, H |
| 262 | R | G, A, K, Q, N, H |
| 263 | G | R, K, A, K, Q, N, H |
| 264 | K | R, G, A, Q, N, H |
| 265 | S | R, G, A, K, Q, N, H |
| 266 | K | R, G, A, Q, N, H |
| 267 | E | R, G, A, K, Q, N, H |
| 268 | R | G, A, K, Q, N, H |
| 269 | D | R, G, A, K, Q, N, H |
| 270 | W | R, L, G, A, K, Q, N, H |
| 271 | C | R, P, G, A, K, Q, N, H |
| 272 | C | R, N, G, A, K, Q, H |
| 273 | Q | R, G, A, K, N, H |
| 274 | E | R, G, A, K, Q, N, H |
| 275 | E | R, K, G, A, Q, N, H |
| 276 | L | R, G, A, K, Q, N, H |
| 277 | R | K, G, A, Q, N, H |
| 278 | S | R, E, G, A, K, Q, N, H |
| 279 | Y | R, G, A, K, Q, N, H |
| 280 | V | R, I, G, A, K, Q, N, H |
| 281 | E | R, A, G, K, Q, N, H |
| 282 | Q | R, S, G, A, K, N, H |
| 283 | N | R, G, A, K, Q, H |
| 284 | T | R, I, G, A, K, Q, N, H |
| 285 | I | R, G, A, K, Q, N, H |
| 286 | Q | R, P, G, A, K, N, H |
| 287 | Y | R, F, G, A, K, Q, N, H |
| 288 | D | R, G, A, K, Q, N, H, S |
| 289 | L | R, Q, G, A, K, N, H, M |
| 290 | W | R, N, G, A, K, Q, H |
| 291 | A | R, S, G, K, Q, N, H |
| 292 | W | R, G, A, K, Q, N, H |
| 293 | G | R, S, A, K, Q, N, H |
| 294 | E | R, A, G, K, Q, N, H |
| 295 | M | R, G, A, K, Q, N, H |
| 296 | F | R, L, G, A, K, Q, N, H |
| 297 | N | R, G, A, K, Q, H |
| 298 | K | R, N, G, A, Q, H |
| 299 | A | R, G, K, Q, N, H |
| 300 | H | R, G, A, K, Q, N |
| 301 | T | R, G, A, K, Q, N, H |
| 302 | A | R, G, K, Q, N, H |
| 303 | L | R, I, G, A, K, Q, N, H |
| 304 | K | R, Q, G, A, N, H |
| 305 | I | R, S, G, A, K, Q, N, H |
| 306 | K | R, G, A, Q, N, H |
| 307 | S | R, N, G, A, K, Q, H |
| 308 | T | R, S, G, A, K, Q, N, H |
| 309 | R | G, A, K, Q, N, H |
| 310 | N | R, G, A, K, Q, H |
| 311 | Y | R, G, A, K, Q, N, H |
| 312 | N | R, L, G, A, K, Q, H |
| 313 | F | R, Y, G, A, K, Q, N, H |
| 314 | A | R, T, G, K, Q, N, H |
| 315 | K | R, G, A, Q, N, H |
| 316 | Q | R, E, G, A, K, N, H |
| 317 | R | K, G, A, Q, N, H |
| 318 | L | R, G, A, K, Q, N, H |
| 319 | E | R, G, A, K, Q, N, H |
| 320 | Q | R, G, A, K, N, H |
| 321 | F | R, G, A, K, Q, N, H |
| 322 | K | R, N, G, A, Q, H |
| 323 | E | R, G, A, K, Q, N, H |
| 324 | I | R, G, A, K, Q, N, H |
| 325 | Q | R, G, A, K, N, H |
| 326 | S | R, G, A, K, Q, N, H |
| 327 | L | R, G, A, K, Q, N, H, V |
| 328 | N | R, D, G, A, K, Q, H, S |
| 329 | N | R, G, A, K, Q, H, S |
| 330 | L | R, G, A, K, Q, N, H |
| 331 | L | R, G, A, K, Q, N, H |
| 332 | V | R, A, G, K, Q, N, H |
| 333 | V | R, G, A, K, Q, N, H |
| 334 | K | R, G, A, Q, N, H |
| 335 | K | R, I, G, A, Q, N, H |
| 336 | L | R, G, A, K, Q, N, H |
| 337 | N | R, G, A, K, Q, H |
| 338 | D | R, G, A, K, Q, N, H |
| 339 | F | R, G, A, K, Q, N, H |
| 340 | F | R, G, A, K, Q, N, H |
| 341 | D | R, G, A, K, Q, N, H |
| 342 | S | G, R, A, K, Q, N, H |
| 343 | E | R, G, A, K, Q, N, H |
| 344 | F | R, G, A, K, Q, N, H |
| 345 | F | R, G, A, K, Q, N, H |
| 346 | S | R, G, A, K, Q, N, H |
| 347 | G | R, A, K, Q, N, H |
| 348 | E | R, G, A, K, Q, N, H, S |
| 349 | E | R, N, G, A, K, Q, H, S |
| 350 | T | R, G, A, K, Q, N, H |
| 351 | Y | R, F, G, A, K, Q, N, H, S |
| 352 | T | R, V, G, A, K, Q, N, H |
| 353 | I | R, V, G, A, K, Q, N, H |
| 354 | C | R, G, A, K, Q, N, H |
| 355 | V | R, K, G, A, Q, N, H |
| 356 | H | R, G, A, K, Q, N |
| 357 | H | R, G, A, K, Q, N, S |
| 358 | L | R, G, A, K, Q, N, H |
| 359 | G | R, A, K, Q, N, H |
| 360 | G | R, A, K, Q, N, H |
| 361 | K | R, G, A, Q, N, H |
| 362 | D | R, G, A, K, Q, N, H |
| 363 | L | R, G, A, K, Q, N, H |
| 364 | S | R, G, A, K, Q, N, H |
| 365 | K | R, E, G, A, Q, N, H |
| 366 | L | R, G, A, K, Q, N, H |
| 367 | Y | R, F, G, A, K, Q, N, H |
| 368 | K | R, G, A, Q, N, H |
| 369 | A | R, I, G, K, Q, N, H |
| 370 | W | R, G, A, K, Q, N, H |
| 371 | E | R, G, A, K, Q, N, H |
| 372 | D | R, E, G, A, K, Q, N, H |
| 373 | D | R, L, G, A, K, Q, N, H |
| 374 | P | R, G, A, K, Q, N, H |
| 375 | A | R, G, K, Q, N, H |
| 376 | D | R, G, A, K, Q, N, H |
| 377 | P | R, M, G, A, K, Q, N, H |
| 378 | E | R, D, G, A, K, Q, N, H |
| 379 | N | R, G, A, K, Q, H |
| 380 | A | R, G, K, Q, N, H |
| 381 | I | R, G, A, K, Q, N, H |
| 382 | V | R, G, A, K, Q, N, H |
| 383 | V | R, G, A, K, Q, N, H, D, E |
| 384 | L | R, Y, G, A, K, Q, N, H |
| 385 | C | R, G, A, K, Q, N, H |
| 386 | D | R, G, A, K, Q, N, H, E, D |
| 387 | D | R, G, A, K, Q, N, H, E |
| 388 | L | R, C, G, A, K, Q, N, H |
| 389 | K | R, G, A, Q, N, H |
| 390 | N | R, D, G, A, K, Q, H |
| 391 | N | R, K, G, A, Q, H |
| 392 | F | R, G, A, K, Q, N, H |
| 393 | K | R, S, G, A, Q, N, H |
| 394 | K | R, G, A, Q, N, H |
| 395 | E | R, G, A, K, Q, N, H, S |
| 396 | P | R, G, A, K, Q, N, H |
| 397 | I | R, G, A, K, Q, N, H, V |
| 398 | R | G, A, K, Q, N, H |
| 399 | N | R, G, A, K, Q, H, S |
| 400 | I | R, L, G, A, K, Q, N, H |
| 401 | L | R, G, A, K, Q, N, H |
| 402 | R | G, A, K, Q, N, H, S |
| 403 | Y | R, G, A, K, Q, N, H |
| 404 | I | R, G, A, K, Q, N, H |
| 405 | F | R, Y, G, A, K, Q, N, H |
| 406 | T | R, G, A, K, Q, N, H |
| 407 | I | R, Y, G, A, K, Q, N, H |
| 408 | R | G, A, K, Q, N, H |
| 409 | Q | R, D, G, A, K, N, H |
| 410 | E | R, K, G, A, Q, N, H |
| 411 | C | R, I, G, A, K, Q, N, H |
| 412 | S | R, G, A, K, Q, N, H |
| 413 | A | R, G, K, Q, N, H |
| 414 | Q | R, K, G, A, N, H |
| 415 | D | R, G, A, K, Q, N, H |
| 416 | I | R, F, G, A, K, Q, N, H |
| 417 | L | R, G, A, K, Q, N, H |
| 418 | A | R, G, K, Q, N, H |
| 419 | A | R, D, G, K, Q, N, H |
| 420 | A | R, G, K, Q, N, H |
| 421 | K | R, G, A, Q, N, H |
| 422 | Y | R, G, A, K, Q, N, H |
| 423 | N | R, G, A, K, Q, H |
| 424 | Q | R, G, A, K, N, H |
| 425 | Q | R, L, G, A, K, N, H |
| 426 | L | R, G, A, K, Q, N, H |
| 427 | D | R, E, G, A, K, Q, N, H |
| 428 | R | K, G, A, Q, N, H |
| 429 | Y | R, N, G, A, K, Q, H |
| 430 | K | R, G, A, Q, N, H |
| 431 | S | R, G, A, K, Q, N, H |
| 432 | Q | R, K, G, A, K, N, H |
| 433 | K | R, G, A, Q, N, H, S |
| 434 | A | R, I, G, K, Q, N, H |
| 435 | N | R, H, G, A, K, Q |
| 436 | P | R, G, A, K, Q, N, H |
| 437 | S | R, T, G, A, K, Q, N, H |
| 438 | V | R, G, A, K, Q, N, H |
| 439 | L | R, G, A, K, Q, N, H |
| 440 | G | R, A, K, Q, N, H |
| 441 | N | R, G, A, K, Q, H |
| 442 | Q | R, T, G, A, K, N, H |
| 443 | G | R, A, K, Q, N, H |
| 444 | F | R, G, A, K, Q, N, H |
| 445 | T | R, N, G, A, K, Q, H |
| 446 | W | R, G, A, K, Q, N, H |
| 447 | T | R, G, A, K, Q, N, H, S, M |
| 448 | N | R, G, A, K, Q, H |
| 449 | A | R, S, G, K, Q, N, H |
| 450 | V | R, T, G, A, K, Q, N, H |
| 451 | I | R, G, A, K, Q, N, H |
| 452 | L | R, T, G, A, K, Q, N, H |
| 453 | P | R, G, A, K, Q, N, H |
| 454 | E | R, P, G, A, K, Q, N, H |
| 455 | K | R, N, G, A, Q, H |
| 456 | A | R, G, K, Q, N, H |
| 457 | Q | R, G, A, K, N, H |
| 458 | R | V, G, A, K, Q. N, H |
| 459 | N | R, K, G, A, Q, H |
| 460 | D | R, G, A, K, Q, N, H |
| 461 | R | G, A, K, Q, N, H |
| 462 | P | R, G, A, K, Q, N, H |
| 463 | N | R, A, G, K, Q, H |
| 464 | S | R, G, A, K, Q, N, H |
| 465 | L | R, S, G, A, K, Q, N, H |
| 466 | D | R, G, A, K, Q, N, H |
| 467 | L | R, G, A, K, Q, N, H |
| 468 | R | M, G, A, K, Q, N, H |
| 469 | I | R, G, A, K, Q, N, H |
| 470 | W | R, G, A, K, Q, N, H |
| 471 | L | R, V, G, A, K, Q, N, H |
| 472 | Y | R, T, G, A, K, Q, N, H |
| 473 | L | R, M, G, A, K, Q, N, H |
| 474 | K | R, T, G, A, Q, N, H |
| 475 | L | R, V, G, A, K, Q, N, H |
| 476 | R | G, A, K, Q, N, H |
| 477 | H | R, G, A, K, Q, N |
| 478 | P | R, D, G, A, K, Q, N, H |
| 479 | D | R, N, G, A, K, Q, H |
| 480 | G | R, A, K, Q, N, H |
| 481 | R | G, A, K, Q, N, H |
| 482 | W | R, G, A, K, Q, N, H |
| 483 | K | R, G, A, Q, N, H |
| 484 | K | R, G, A, Q, N, H |
| 485 | H | R, G, A, K, Q, N |
| 486 | H | R, G, A, K, Q, N |
| 487 | I | R, G, A, K, Q, N, H |
| 488 | P | R, G, A, K, Q, N, H |
| 489 | F | R, G, A, K, Q, N, H |
| 490 | Y | R, H, G, A, K, Q, N |
| 491 | D | R, N, G, A, K, Q, N, H |
| 492 | T | R, S, G, A, K, Q, N, H |
| 493 | R | G, A, K, Q, N, H |
| 494 | F | R, Y, G, A, K, Q, N, H |
| 495 | F | R, Y, G, A, K, Q, N, H |
| 496 | Q | R, E, G, A, K, N, H, S |
| 497 | E | R, G, A, K, Q, N, H |
| 498 | I | R, G, A, K, Q, N, H |
| 499 | Y | R, G, A, K, Q, N, H |
| 500 | A | R, G, K, Q, N, H |
| 501 | A | R, Y, G, K, Q, N, H |
| 502 | G | R, A, K, Q, N, H |
| 503 | N | R, G, A, K, Q, H |
| 504 | S | R, G, G, A, K, Q, N, H |
| 505 | P | R, L, G, A, K, Q, N, H |
| 506 | V | R, P, G, A, K, Q, N, H |
| 507 | D | R, T, G, A, K, Q, N, H |
| 508 | T | R, G, A, K, Q, N, H |
| 509 | C | R, G, A, K, Q, N, H |
| 510 | Q | R, G, A, K, N, H |
| 511 | F | R, P, G, A, K, Q, N, H |
| 512 | R | G, A, K, Q, N, H |
| 513 | T | R, G, A, K, Q, N, H |
| 514 | P | R, K, G, A, K, Q, N, H |
| 515 | R | G, A, K, Q, N, H |
| 516 | F | R, G, A, K, Q, N, H |
| 517 | G | R, A, K, Q, N, H |
| 518 | Y | R, G, A, K, Q, N, H |
| 519 | H | R, G, A, K, Q, N |
| 520 | L | R, G, A, K, Q, N, H |
| 521 | P | R, G, A, K, Q, N, H |
| 522 | K | R, G, A, Q, N, H |
| 523 | L | R, I, G, A, K, Q, N, H |
| 524 | T | R, S, G, A, K, Q, N, H |
| 525 | D | R, G, A, K, Q, N, H |
| 526 | Q | R, G, A, K, N, H |
| 527 | T | R, G, A, K, Q, N, H |
| 528 | A | R, G, K, Q, N, H |
| 529 | I | R, G, A, K, Q, N, H |
| 530 | R | G, A, K, Q, N, H |
| 531 | V | R, L, G, A, K, Q, N, H |
| 532 | N | R, K, G, A, Q, H |
| 533 | K | R, G, A, Q, N, H |
| 534 | K | R, G, A, Q, N, H |
| 535 | H | R, G, A, K, Q, N |
| 536 | V | R, G, A, K, Q, N, H |
| 537 | K | R, G, A, Q, N, H |
| 538 | A | R, G, K, Q, N, H |
| 539 | A | R, G, K, Q, N, H |
| 540 | K | R, G, A, Q, N, H |
| 541 | T | R, G, A, K, Q, N, H, Y |
| 542 | E | R, G, A, K, Q, N, H |
| 543 | A | R, G, K, Q, N, H |
| 544 | R | G, A, K, Q, N, H |
| 545 | I | R, G, A, K, Q, N, H |
| 546 | R | G, A, K, Q, N, H |
| 547 | L | R, G, A, K, Q, N, H |
| 548 | A | R, N, G, K, Q, N, H |
| 549 | I | R, G, A, K, Q, N, H |
| 550 | Q | R, G, A, K, N, H |
| 551 | Q | R, G, A, K, N, H |
| 552 | G | R, N, A, K, Q, N, H |
| 553 | T | R, V, G, A, K, Q, N, H |
| 554 | L | R, A, G, A, K, Q, N, H |
| 555 | P | R, G, A, K, Q, N, H |
| 556 | V | R, G, A, K, Q, N, H |
| 557 | S | R, G, A, K, Q, N, H |
| 558 | N | R, G, A, K, Q, H |
| 559 | L | R, F, G, A, K, Q, N, H |
| 560 | K | R, D, G, A, Q, N, H |
| 561 | I | R, G, A, K, Q, N, H |
| 562 | T | R, G, A, K, Q, N, H |
| 563 | E | R, G, A, K, Q, N, H |
| 564 | I | R, T, G, A, K, Q, N, H |
| 565 | S | R, N, G, A, K, Q, H |
| 566 | A | R, F, G, K, Q, N, H |
| 567 | T | R, G, A, K, Q, N, H |
| 568 | I | R, V, G, A, K, Q, N, H |
| 569 | N | R, G, A, K, Q, H |
| 570 | S | R, G, A, K, Q, N, H |
| 571 | K | R, G, A, Q, N, H |
| 572 | G | R, N, A, K, Q, N, H |
| 573 | Q | R, D, G, A, K, N, H |
| 574 | V | R, I, G, A, K, Q, N, H |
| 575 | R | T, H, K, N, G, A. Q |
| 576 | I | R, H, K, N, G, A, Q |
| 577 | P | R, S, H, K, N, G, A, Q, T, |
| | | V, Y, F, L |
| 578 | V | R, H, K, N, G, A, Q |
| 579 | K | R, H, N, G, A, Q |
| 580 | F | R, V, H, K, N, G, A, Q |
| 581 | D | R, H, K, N, G, A, Q |
| 582 | V | R, G, H, K, N, G, A, Q |
| 583 | G | R, H, K, N, A, Q |
| 584 | R | G, K, H, K, N, A, Q |
| 585 | Q | R, G, Y, H, K, N, A |
| 586 | K | R, G, H, N, A, Q |
| 587 | G | R, H, K, NA, Q |
| 588 | T | R, G, K, H, N A, Q |
| 589 | L | R, G, H, K, N A, Q |
| 590 | Q | R, G, H, K, N, A |
| 591 | I | R, G, H, K, N, A, Q |
| 592 | G | R, H, K, N, A, Q |
| 593 | D | R, G, H, K, N, A, Q |
| 594 | R | G, H, K, N, A, Q |
| 595 | F | R, G, I, H, K, N, A, Q |
| 596 | C | R, G, M, H, K, N, A, Q |
| 597 | G | R, H, K, N, A, Q |
| 598 | Y | R, G, H, K, N, A, Q |
| 599 | D | A |
| 600 | Q | R, G, K, N, H, A, D, C, E, I, L, |
| | | M, F, P, S, T, W, Y, V |
| 601 | N | R, G, K, H, A, D, C, Q, E, I, L, |
| | | M, F, P, S, T, W, Y, V |
| 602 | Q | R, G, K, N, H, A, D, C, E, I, L, |
| | | M, F, P, S, T, W, Y, V |
| 603 | T | R, G, K, N, H, A, D, C, Q, E, I, |
| | | L, M, F, P, S, W, Y, V |
| 604 | A | R, G, K, N, H, D, C, Q, E, I, L, |
| | | M, F, P, S, T, W, Y, V |
| 605 | S | R, G, K, N, H, A, D, C, Q, E, I, |
| | | L, M, F, P, T, W, Y, V |
| 606 | H | R, G, K, N, A, D, C, Q, E, I, L, |
| | | M, F, P, S, T, W, Y, V |
| 607 | A | R, G, K, N, H, D, C, Q, E, I, L, |
| | | M, F, P, S, T, W, Y, V |
| 608 | Y | R, G, H, K, N, A, Q |
| 609 | S | R, G, H, K, N, A, Q |
| 610 | L | R, G, I, H, K, N, A, Q |
| 611 | W | R, G, H, K, N, A, Q |
| 612 | E | R, G, H, K, N, A, Q |
| 613 | V | R, G, H, K, N, A, Q |
| 614 | V | R, G, H, K, N, A, Q |
| 615 | K | R, G, E, H, N, A, Q |
| 616 | E | R, G, H, K, N, A, Q |
| 617 | G | R, H, K, N, A, Q |
| 618 | Q | R, G, T, H, K, N, A |
| 619 | Y | R, G, S, H, K, N, A, Q |
| 620 | H | R, G, K, N, A, Q |
| 621 | K | R, G, H, N, A, Q |
| 622 | E | R, G, H, K, N, A, Q |
| 623 | L | R, G, N, H, K, A, Q |
| 624 | G | R, H, K, N, A, Q |
| 625 | C | R, G, H, K, N, A, Q, A, Q |
| 626 | F | R, G, W, H, K, N, A, Q |
| 627 | V | R, G, H, K, N, A, Q |
| 628 | R | G, H, K, N, A, Q |
| 629 | F | R, G, L, H, K, N, A, Q |
| 630 | I | R, G, V, H, K, N, A, Q |
| 631 | S | R, G, E, H, K, N, A, Q |
| 632 | S | R, G, D, H, K, N, A, Q |
| 633 | G | R, H, K, N, A, Q |
| 634 | D | R, G, K, H, K, N, A, Q |
| 635 | I | R, G, H, K, N, A, Q |
| 636 | V | R, G, T, H, K, N, A, Q |
| 637 | S | R, G, H, K, N, A, Q |
| 638 | I | R, G, H, K, N, A, Q |
| 639 | T | R, G, H, K, N, A, Q |
| 640 | E | R, G, H, K, N, A, Q |
| 641 | N | R, G, H, K, A, Q |
| 642 | R | G, H, K, N, A, Q |
| 643 | G | R, H, K, N, A, Q |
| 644 | N | R, G, H, K, A, Q |
| 645 | Q | R, G, H, K, N, A |
| 646 | F | R, G, V, H, K, N, A, Q, Y |
| 647 | D | R, G, H, K, N, A, Q |
| 648 | Q | R, G, H, K, N, A, |
| 649 | L | R, G, H, K, N, A, Q |
| 650 | S | R, G, H, K, N, A, Q |
| 651 | Y | R, G, H, K, N, A, Q |
| 652 | E | R, G, D, H, K, N, A, Q |
| 653 | G | R, H, K, N, A, Q |
| 654 | L | R, G, H, K, N, A, Q |
| 655 | A | R, G, H, K, N, Q |
| 656 | Y | R, G, H, K, N, A, Q |
| 657 | P | R, G, H, K, N, A, Q |
| 658 | Q | R, G, H, K, N, A |
| 659 | Y | R, G, F, H, K, N, A, Q |
| 660 | A | R, G, H, K, N, Q |
| 661 | D | R, G, E, H, K, N, A, Q |
| 662 | W | R, G, H, K, N, A, Q |
| 663 | R | G, H, K, N, A, Q |
| 664 | K | R, G, H, N, A, Q |
| 665 | K | R, G, H, N, A, Q |
| 666 | A | R, G, H, K, N, Q |
| 667 | S | R, G, H, K, N, A, Q |
| 668 | K | R, G, H, N, A, Q |
| 669 | F | R, G, H, K, N, A, Q |
| 670 | V | R, G, L, H, K, N, A, Q |
| 671 | S | R, G, H, K, N, A, Q |
| 672 | L | R, G, S, H, K, N, A, Q |
| 673 | W | R, G, H, K, N, A, Q |
| 674 | Q | R, G, H, K, N, A |
| 675 | I | R, G, H, K, N, A, Q |
| 676 | T | R, G, H, K, N, A, Q |
| 677 | K | R, G, H, N, A, Q |
| 678 | K | R, G, H, N, A, Q |
| 679 | N | R, G, K, N, A, Q |
| 680 | K | R, G, H, N, A, Q |
| 681 | K | R, G, H, N, A, Q |
| 682 | K | R, G, H, N, A, Q |
| 683 | E | R, G, H, K, N, A, Q |
| 684 | I | R, G, D, H, K, N, A, Q |
| 685 | V | R, G, H, K, N, A, Q |
| 686 | T | R, G, H, K, N, A, Q |
| 687 | V | R, G, K, H, N, A, Q |
| 688 | E | R, G, H, K, N, A, Q |
| 689 | A | R, G, H, K, N, Q |
| 690 | K | R, G, H, N, A, Q |
| 691 | E | R, G, H, K, N, A, Q |
| 692 | K | R, G, H, N, A, Q |
| 693 | F | R, G, H, K, N, A, Q |
| 694 | D | R, G, K, H, N, A, Q |
| 695 | A | R, G, H, K, N, Q |
| 696 | I | R, G, H, K, N, A, Q |
| 697 | C | R, G, H, K, N, A, Q |
| 698 | K | R, G, W, H, N, A, Q |
| 699 | Y | R, G, H, K, N, A, Q |
| 700 | Q | R, G, H, K, N, A |
| 701 | P | R, G, H, K, N, A, Q |
| 702 | R | G, H, K, N, A, Q |
| 703 | L | R, G, H, K, N, A, Q |
| 704 | Y | R, G, H, K, N, A, Q |
| 705 | K | R, G, H, N, A, Q |
| 706 | F | R, G, W, H, K, N, A, Q |
| 707 | N | R, G, H, K, A, Q |
| 708 | K | R, G, H, N, A, Q |
| 709 | E | R, G, H, K, N, A, Q |
| 710 | Y | R, G, H, K, N, A, Q |
| 711 | A | R, G, H, K, N, Q |
| 712 | Y | R, G, H, K, N, A, Q |
| 713 | L | R, G, H, K, N, A, Q |
| 714 | L | R, G, H, K, N, A, Q |
| 715 | R | G, L, H, K, N, A, Q |
| 716 | D | R, G, H, K, N, A, Q |
| 717 | I | R, G, H, K, N, A, Q |
| 718 | V | R, G, M, H, K, N, A, Q |
| 719 | R | G, K, H, N, A, Q |
| 720 | G | R, H, K, N, A, Q |
| 721 | K | R, G, N, H, A, Q |
| 722 | S | R, G, H, K, N, A, Q |
| 723 | L | R, G, H, K, N, A, Q |
| 724 | V | R, G, H, K, N, A, Q |
| 725 | E | R, G, N, H, K, A, Q |
| 726 | L | R, G, H, K, N, A, Q |
| 727 | Q | R, G, H, K, N, A |
| 728 | Q | R, G, H, K, N, A |
| 729 | I | R, G, F, H, K, N, A, Q |
| 730 | R | G, H, K, N, A, Q |
| 731 | Q | R, G, A, H, K, N, A |
| 732 | E | R, G, H, K, N, A, Q |
| 733 | I | R, G, H, K, N, A, Q |
| 734 | F | R, G, H, K, N, A, Q |
| 735 | R | G, H, K, N, A, Q |
| 736 | F | R, G, H, K, N, A, Q |
| 737 | I | R, G, H, K, N, A, Q |
| 738 | E | R, G, H, K, N, A, Q |
| 739 | Q | R, G, H, K, N, A |
| 740 | D | R, G, H, K, N, A, Q |
| 741 | C | R, G, F, H, K, N, A, Q, S |
| 742 | G | R, H, K, N, A, Q |
| 743 | V | R, G, H, K, N, A, Q |
| 744 | T | R, G, H, K, N, A, Q |
| 745 | R | G, H, K, N, A, Q |
| 746 | L | R, G, H, K, N, A, Q |
| 747 | G | R, H, K, N, A, Q |
| 748 | S | R, G, H, K, N, A, Q |
| 749 | L | R, G, H, K, N, A, Q |
| 750 | S | R, G, H, K, N, A, Q |
| 751 | L | R, G, H, K, N, A, Q |
| 752 | S | R, G, H, K, N, A, Q |
| 753 | T | R, G, S, H, K, N, A, Q |
| 754 | L | R, G, H, K, N, A, Q |
| 755 | E | R, G, H, K, N, A, Q |
| 756 | T | R, G, H, K, N, A, Q |
| 757 | V | R, G, L, H, K, N, A, Q |
| 758 | K | R, G, H, N, A, Q |
| 759 | A | R, G, N, H, K, Q |
| 760 | V | R, G, H, K, N, A, Q |
| 761 | K | R, G, H, N, A, Q |
| 762 | G | R, S, H, K, N, A, Q |
| 763 | I | R, G, L, H, K, N, A, Q |
| 764 | I | R, G, H, K, N, A, Q |
| 765 | Y | R, G, S, H, K, N, A, Q |
| 766 | S | R, G, H, K, N, A, Q |
| 767 | Y | R, G, H, K, N, A, Q |
| 768 | F | R, G, H, K, N, A, Q |
| 769 | S | R, G, H, K, N, A, Q |
| 770 | T | R, G, L, H, K, N, A, Q |
| 771 | A | R, G, N, H, K, Q |
| 772 | L | R, G, H, K, N, A, Q |
| 773 | N | R, G, H, K, A, Q |
| 774 | A | R, G, N, H, K, Q |
| 775 | S | R, G, H, K, N, A, Q |
| 776 | K | R, G, H, N, A, Q |
| 777 | N | R, G, E, H, K, A, Q |
| 778 | N | R, G, H, K, A, Q |
| 779 | P | R, G, H, K, N, A, Q |
| 780 | I | R, G, H, K, N, A, Q |
| 781 | S | R, G, H, K, N, A, Q |
| 782 | D | R, G, H, K, N, A, Q |
| 783 | E | R, G, H, K, N, A, Q |
| 784 | Q | R, G, D, H, K, N, A |
| 785 | R | G, K, Q, H, N, A, Q |
| 786 | K | R, G, E, H, N, A, Q |
| 787 | E | R, G, H, K, N, A, Q |
| 788 | F | R, G, H, K, N, A, Q |
| 789 | D | R, G, H, K, N, A, Q |
| 790 | P | R, G, H, K, N, A, Q |
| 791 | E | R, G, H, K, N, A, Q |
| 792 | L | R, G, H, K, N, A, Q |
| 793 | F | R, G, H, K, N, A, Q |
| 794 | A | R, G, H, K, N, Q |
| 795 | L | R, G, H, K, N, A, Q |
| 796 | L | R, G, M, H, K, N, A, Q |
| 797 | E | R, G, V, H, K, N, A, Q |
| 798 | K | R, G, H, N, A, Q |
| 799 | L | R, G, I, H, K, N, A, Q |
| 800 | E | R, G, H, K, N, A, Q, S |
| 801 | L | R, G, H, K, N, A, Q |
| 802 | I | R, G, K, H, N, A, Q |
| 803 | R | G, H, K, N, A, Q |
| 804 | T | R, G, H, K, N, A, Q |
| 805 | R | G, N, H, K, A, Q |
| 806 | K | R, G, H, N, A, Q |
| 807 | K | R, G, H, N, A, Q |
| 808 | K | R, G, H, N, A, Q |
| 809 | Q | R, G, E, H, K, N, A, Q |
| 810 | K | R, G, H, N, A, Q |
| 811 | V | R, G, H, K, N, A, Q |
| 812 | E | R, G, S, H, K, N, A, Q |
| 813 | R | G, H, K, N, A, Q |
| 814 | I | R, G, H, K, N, A, Q |
| 815 | A | R, G, S, H, K, N, Q |
| 816 | N | R, G, S, H, K, A, Q |
| 817 | S | R, G, H, K, N, A, Q |
| 818 | L | R, G, H, K, N, A, Q |
| 819 | I | R, G, L, H, K, N, A, Q |
| 820 | Q | R, G, H, K, N, A |
| 821 | T | R, G, I, H, K, N, A, Q |
| 822 | C | R, G, A, H, K, N, A, Q |
| 823 | L | R, G, H, K, N, A, Q |
| 824 | E | R, G, H, K, N, A, Q |
| 825 | N | R, G, H, K, A, Q |
| 826 | N | R, G, H, K, A, Q |
| 827 | I | R, G, V, H, K, N, A, Q |
| 828 | K | R, G, H, N, A, Q |
| 829 | F | R, G, H, K, N, A, Q |
| 830 | I | R, G, H, K, N, A, Q |
| 831 | R | G, V, H, K, N, A, Q |
| 832 | G | R, V, H, K, N, A, Q |
| 833 | E | A |
| 834 | G | R, K, N, H, A, D, C, Q, E, I, |
| | | L, M, F, P, S, T, W, Y, V |
| 835 | D | R, G, K, N, H, A, C, Q, E, I, |
| | | L, M, F, P, S, T, W, Y, V |
| 836 | L | R, G, K, N, H, A, D, C, Q, E, |
| | | I, M, F, P, S, T, W, Y, V |
| 837 | S | R, G, K, N, H, A, D, C, Q, E, |
| | | I, L, M, F, P, T, W, Y, V |
| 838 | T | R, G, K, N, H, A, D, C, Q, E, |
| | | I, L, M, F, P, S, W, Y, V |
| 839 | T | R, G, K, N, H, A, D, C, Q, E, |
| | | I, L, M, F, P, S, W, Y, V |
| 840 | N | R, G, K, H, A, D, C, Q, E, I, |
| | | L, M, F, P, S, T, W, Y, V |
| 841 | N | R, G, K, H, A, D, C, Q, E, I, |
| | | L, M, F, P, S, T, W, Y, V |
| 842 | A | R, G, K, N, H, D, C, Q, E, I, |
| | | L, M, F, P, S, T, W, Y, V |
| 843 | T | R, G, K, N, H, A, D, C, Q, E, |
| | | I, L, M, F, P, S, W, Y, V |
| 844 | K | R, G, N, H, A, D, C, Q, E, I, |
| | | L, M, F, P, S, T, W, Y, V |
| 845 | K | R, G, N, H, A, D, C, Q, E, I, |
| | | L, M, F, P, S, T, W, Y, V |
| 846 | K | R, G, N, H, A, D, C, Q, E, I, |
| | | L, M, F, P, S, T, W, Y, V |
| 847 | A | R, G, K, N, H, D, C, Q, E, I, |
| | | L, M, F, P, S, T, W, Y, V |
| 848 | N | R, G, K, H, A, D, C, Q, E, I, |
| | | L, M, F, P, S, T, W, Y, V |
| 849 | S | R, G, K, N, H, A, D, C, Q, E, |
| | | I, L, M, F, P, T, W, Y, V |
| 850 | R | G, K, N, H, A, D, C, Q, E, |
| | | I, L, M, F, P, S, T, W, Y, V |
| 851 | S | R, G, K, N, H, A, D, C, Q, E, |
| | | I, L, M, F, P, T, W, Y, V |
| 852 | M | R, G, K, N, H, A, D, C, Q, E, |
| | | I, L, F, P, S, T, W, Y, V |
| 853 | D | R, G, K, N, H, A, C, Q, E, I, |
| | | L, M, F, P, S, T, W, Y, V |
| 854 | W | R, G, K, N, H, A, D, C, Q, E, |
| | | I, L, M, F, P, S, T, Y, V |
| 855 | L | R, G, K, N, H, A, D, C, Q, E, |
| | | I, M, F, P, S, T, W, Y, V |
| 856 | A | R, G, K, N, H, D, C, Q, E, I, |
| | | L, M, F, P, S, T, W, Y, V |
| 857 | R | G, K, N, H, A, D, C, Q, E, I, |
| | | L, M, F, P, S, T, W, Y, V |
| 858 | G | R, K, N, H, A, D, C, Q, E, I, |
| | | L, M, F, P, S, T, W, Y, V |
| 859 | V | R, G, K, N, H, A, D, C, Q, E, |
| | | I, L, M, F, P, S, T, W, Y |
| 860 | F | R, G, K, N, H, A, D, C, Q, E, |
| | | I, L, M, P, S, T, W, Y, V |
| 861 | N | R, G, K, H, A, D, C, Q, E, I, |
| | | L, M, F, P, S, T, W, Y, V |
| 862 | K | R, G, N, H, A, D, C, Q, E, I, |
| | | L, M, F, P, S, T, W, Y, V |
| 863 | I | R, G, K, N, H, A, D, C, Q, |
| | | E, L, M, F, P, S, T, W, Y, V |
| 864 | R | G, K, N, H, A, D, C, Q, E, I, |
| | | L, M, F, P, S, T, W, Y, V |
| 865 | Q | R, G, K, N, H, A, D, C, E, I, |
| | | L, M, F, P, S, T, W, Y, V |
| 866 | L | R, G, K, N, H, A, D, C, Q, E, |
| | | I, M, F, P, S, T, W, Y, V |
| 867 | A | R, G, K, N, H, D, C, Q, E, I, |
| | | L, M, F, P, S, T, W, Y, V |
| 868 | P | R, G, K, N, H, A, D, C, Q, E, |
| | | I, L, M, F, S, T, W, Y, V |
| 869 | M | R, G, K, N, H, A, D, C, Q, E, |
| | | I, L, F, P, S, T, W, Y, V |
| 870 | H | R, G, K, N, A, D, C, Q, E, I, |
| | | L, M, F, P, S, T, W, Y, V |
| 871 | N | R, G, K, H, A, D, C, Q, E, I, |
| | | L, M, F, P, S, T, W, Y, V |
| 872 | I | R, G, H, K, N, A, Q |
| 873 | T | R, G, H, K, N, A, Q |
| 874 | L | R, G, H, K, N, A, Q |
| 875 | F | R, G, H, K, N, A, Q |
| 876 | G | R, H, K, N, A, Q |
| 877 | C | R, G, K, N, H, A, D, Q, E, I, |
| | | L, M, F, P, S, T, W, Y, V |
| 878 | G | R, K, N, H, A, D, C, Q, E, I, |
| | | L, M, F, P, S, T, W, Y, V |
| 879 | S | R, G, K, N, H, A, D, C, Q, E, |
| | | I, L, M, F, P, T, W, Y, V |
| 880 | L | R, G, K, N, H, A, D, C, Q, E, |
| | | I, M, F, P, S, T, W, Y, V |
| 881 | Y | R, G, K, N, H, A, D, C, Q, E, |
| | | I, L, M, F, P, S, T, W, V |
| 882 | T | R, G, K, N, H, A, D, C, Q, E, |
| | | I, L, M, F, P, S, W, Y, V |
| 883 | S | R, G, K, N, H, A, D, C, Q, E, |
| | | I, L, M, F, P, T, W, Y, V |
| 884 | H | R, G, K, N, A, D, C, Q, E, I, |
| | | L, M, F, P, S, T, W, Y, V |
| 885 | Q | R, G, K, N, H, A, D, C, E, I, |
| | | L, M, F, P, S, T, W, Y, V |
| 886 | D | R, G, H, K, N, A, Q |
| 887 | P | R, G, H, K, N, A, Q |
| 888 | L | R, G, F, H, K, N, A, Q |
| 889 | V | R, G, H, K, N, A, Q |
| 890 | H | R, G, K, N, A, Q |
| 891 | R | G, H, K, N, A, Q |
| 892 | N | R, G, H, K, A, Q |
| 893 | P | R, G, H, K, N, A, Q |
| 894 | D | R, G, H, K, N, A, Q |
| 895 | K | R, G, H, N, A, Q |
| 896 | A | R, G, H, K, N, Q |
| 897 | M | R, G, K, H, N, A, Q |
| 898 | K | R, E, H, N, A, Q |
| 899 | C | R, G, A, H, K, N, Q |
| 900 | R | G, H, K, N, A, Q |
| 901 | W | R, G, F, Y, H, K, N, A, Q |
| 902 | A | R, G, H, K, N, Q |
| 903 | A | R, G, H, K, N, Q |
| 904 | I | R, G, V, H, K, N, A, Q |
| 905 | P | R, G, H, K, N, A, Q |
| 906 | V | R, G, P, H, K, N, A, Q |
| 907 | K | R, G, S, H, N, A, Q |
| 908 | D | R, G, H, K, N, A, Q |
| 909 | I | R, G, H, K, N, A, Q |
| 910 | G | R, K, H, K, N, A, Q |
| 911 | D | R, G, E, H, K, N, A, Q |
| 912 | W | R, G, Y, H, K, N, A, Q |
| 913 | V | R, G, H, K, N, A, Q |
| 914 | L | R, G, H, K, N, A, Q |
| 915 | R | G, H, K, N, A, Q |
| 916 | K | R, G, H, N, A, Q |
| 917 | L | R, G, F, H, K, N, A, Q |
| 918 | S | R, G, H, K, N, A, Q |
| 919 | Q | R, G, H, K, N, A |
| 920 | N | R, G, W, H, K, A, Q |
| 921 | L | R, G, H, K, N, A, Q |
| 922 | R | G, H, K, N, A, Q |
| 923 | A | R, G, H, K, N, Q |
| 924 | K | R, G, H, N, A, Q |
| 925 | N | R, G, T, H, K, A, Q, D, E |
| 926 | I | R, G, S, H, K, N, A, Q |
| 927 | G | R, T, H, K, N, A, Q |
| 928 | T | R, G, H, K, N, A, Q |
| 929 | G | R, H, K, N, A, Q |
| 930 | E | R, G, H, K, N, A, Q |
| 931 | Y | R, G, L, H, K, N, A, Q |
| 932 | Y | R, G, H, K, N, A, Q |
| 933 | H | R, G, K, N, A, Q |
| 934 | Q | R, G, E, H, K, N, A |
| 935 | G | R, A, H, K, N, A, Q |
| 936 | V | R, G, L, H, K, N, A, Q |
| 937 | K | R, G, H, N, A, Q |
| 938 | E | R, G, H, K, N, A, Q |
| 939 | F | R, G, H, K, N, A, Q |
| 940 | L | R, G, H, K, N, A, Q |
| 941 | S | R, G, H, K, N, A, Q |
| 942 | H | R, G, K, N, A, Q |
| 943 | Y | R, G, H, K, N, A, Q |
| 944 | E | R, G, H, K, N, A, Q |
| 945 | L | R, G, H, K, N, A, Q |
| 946 | Q | R, G, D, H, K, N, A |
| 947 | D | R, G, H, K, N, A, Q |
| 948 | L | R, G, D, H, K, N, A, Q |
| 949 | E | R, G, H, K, N, A, Q |
| 950 | E | R, G, L, H, K, N, A, Q |
| 951 | E | R, G, P, H, K, N, A, Q |
| 952 | L | R, G, K, H, K, N, A, Q |
| 953 | L | R, G, M, H, K, N, A, Q |
| 954 | K | R, G, H, N, A, Q |
| 955 | W | R, G, F, H, K, N, A, Q |
| 956 | R | G, H, K, N, A, Q |
| 957 | S | R, G, H, K, N, A, Q |
| 958 | D | R, G, L, H, K, N, A, Q |
| 959 | R | G, K, H, N, A, Q |
| 960 | K | R, G, H, K, N, A, Q |
| 961 | S | R, G, H, K, N, A, Q |
| 962 | N | R, G, H, K, A, Q |
| 963 | I | R, G, H, K, N, A, Q |
| 964 | P | R, G, H, K, N, A, Q |
| 965 | C | R, G, H, K, N, A, Q |
| 966 | W | R, G, H, K, N, A, Q |
| 967 | V | R, G, H, K, N, A, Q |
| 968 | L | R, G, H, K, N, A, Q |
| 969 | Q | R, G, H, K, N, A |
| 970 | N | R, G, H, K, A, Q |
| 971 | R | G, H, K, N, A, Q |
| 972 | L | G, I, H, K, N, A, Q |
| 973 | A | R, G, L, H, K, N, Q |
| 974 | E | R, G, H, K, N, A, Q |
| 975 | K | R, G, D, H, N, A, Q |
| 976 | L | R, G, H, K, N, A, Q |
| 977 | G | R, H, K, N, A, Q |
| 978 | N | R, G, H, K, A, Q |
| 979 | K | R, G, H, N, A, Q |
| 980 | E | R, G, H, K, N, A, Q |
| 981 | A | R, G, H, K, N, Q |
| 982 | V | R, G, H, K, N, A, Q |
| 983 | V | R, G, H, K, N, A, Q |
| 984 | Y | R, G, I, H, K, N, A, Q |
| 985 | I | R, G, H, K, N, A, Q |
| 986 | P | R, G, H, K, N, A, Q |
| 987 | V | R, G, H, K, N, A, Q |
| 988 | R | G, H, K, N, A, Q |
| 989 | G | R, H, K, N, A, Q |
| 990 | G | R, H, K, N, A, Q |
| 991 | R | G, H, K, N, A, Q |
| 992 | I | R, G, H, K, N, A, Q |
| 993 | Y | R, G, H, K, N, A, Q |
| 994 | F | R, G, L, H, K, N, A, Q |
| 995 | A | R, G, S, H, K, N, A, Q |
| 996 | T | R, G, H, K, N, A, Q |
| 997 | H | R, G, K, N, A, Q |
| 998 | K | R, G, P, H, N, A, Q |
| 999 | V | R, G, H, K, N, A, Q |
| 1000 | A | R, G, T, H, K, N, Q |
| 1001 | T | R, G, H, K, N, A, Q |
| 1002 | G | R, D, H, K, N, A, Q |
| 1003 | A | R, G, S, H, K, N, Q |
| 1004 | V | R, G, S, H, K, N, A, Q |
| 1005 | S | R, G, K, H, N, A, Q |
| 1006 | I | R, G, H, K, N, A, Q |
| 1007 | V | R, G, H, K, N, A, Q |
| 1008 | F | R, G, H, K, N, A, Q |
| 1009 | D | R, G, N, H, K, A, Q |
| 1010 | Q | R, G, H, K, N, A |
| 1011 | K | R, G, H, N, A, Q |
| 1012 | Q | R, G, E, H, K, N, A |
| 1013 | V | R, G, H, K, N, A, Q |
| 1014 | W | R, G, H, K, N, A, Q |
| 1015 | V | R, G, H, K, N, A, Q |
| 1016 | C | R, G, N, H, K, A, Q |
| 1017 | N | R, G, H, K, A, Q |
| 1018 | A | R, G, S, H, K, N, Q |
| 1019 | D | A |
| 1020 | H | R, G, K, N, A, Q |
| 1021 | V | R, G, H, K, N, A, Q |
| 1022 | A | R, G, H, K, N, Q, S |
| 1023 | A | R, G, H, K, N, Q |
| 1024 | A | R, G, V, H, K, N, Q |
| 1025 | N | R, G, H, K, A, Q |
| 1026 | I | R, G, H, K, N, A, Q, V |
| 1027 | A | R, G, V, H, K, N, Q |
| 1028 | L | R, G, H, K, N, A, Q |
| 1029 | T | R, G, H, K, N, A, Q |
| 1030 | V | R, G, H, K, N, A, Q |
| 1031 | K | R, G, H, N, A, Q |
| 1032 | G | R, H, K, N, A, Q |
| 1033 | I | R, G, H, K, N, A, Q |
| 1034 | G | R, H, K, N, A, Q |
| 1035 | E | R, G, I, H, K, N, A, Q |
| 1036 | Q | R, G, H, K, N, A |
| 1037 | S | R, G, H, K, N, A, Q |
| 1038 | S | R, G, E, H, K, N, A, Q |
| 1039 | D | R, G, H, K, N, A, Q |
| 1040 | E | R, G, H, K, N, A, Q |
| 1041 | E | R, G, H, K, N, A, Q |
| 1042 | N | R, G, H, K, A, Q |
| 1043 | P | R, G, H, K, N, A, Q |
| 1044 | D | R, G, K, H, N, A, Q |
| 1045 | G | R, H, K, N, A, Q |
| 1046 | S | R, G, K, H, K, N, A, Q |
| 1047 | R | G, K, H, K, N, A, Q |
| 1048 | I | R, G, H, K, N, A, Q |
| 1049 | K | R, G, H, N, A, Q |
| 1050 | L | R, G, H, K, N, A, Q |
| 1051 | Q | R, G, H, K, N, A, Q |
| 1052 | L | R, G, H, K, N, A, Q |
| 1053 | T | R, G, H, K, N, A, Q |
| 1054 | S | R, G, H, K, N, A, Q |

[0500] In some embodiments, the variant Cas12i2 polypeptide comprises one or more of the amino acid substitutions listed in Table 2. In some embodiments, the variant Cas12i2 polypeptide comprises a sequence set forth in any one of SEQ ID NOs: 3-5, 495, or 496, which are depicted in FIG. 1. In some embodiments, the variant Cas12i2 polypeptide comprises a sequence set forth in any one of SEQ ID NOs: 6-146.

[0501] In some embodiments, the compositions described herein comprise one or more individual (e.g., 2, 3, 4, 5, 6, 7, 8, 9, or more) variant Cas12i2 polypeptides. In such embodiments, the individual variant polypeptides may independently comprise one or more of the amino acid substitutions listed in Table 2. In some embodiments, the individual variant Cas12i2 polypeptides comprise a sequence set forth in any one of SEQ ID NOs: 3-5, 495, or 496, which are depicted in FIG. 1. In some embodiments, the individual variant Cas12i2 polypeptides comprise a sequence set forth in any one of SEQ ID NOs: 6-146.

[0502] In some embodiments, the variant Cas12i2 polypeptide comprises a mutation or set of mutations as set forth in Table 3, wherein the mutations are relative to the sequence of SEQ ID NO: 2.

TABLE 3
Cas12i2 Variant Substitutions and Sequences.

| SEQ ID NO | Mutations (relative to SEQ ID NO: 2) |
|---|---|
| 3 | D581R D911R I926R V1030G |
| 4 | D581R I926R V1030G |
| 5 | D581R I926R V1030G S1046G |
| 6 | D581R |
| 7 | L589R |
| 8 | E652R |
| 9 | T770R |
| 10 | Q820R |
| 11 | D835R |
| 12 | L836R |
| 13 | K862R |
| 14 | P868R |
| 15 | S879R |
| 16 | S883R |
| 17 | D911R |
| 18 | W912R |
| 19 | N925R |
| 20 | I926R |
| 21 | Q1010G |
| 22 | V1030G |
| 23 | D581R D911R I926R |
| 24 | L836R D911R |
| 25 | D581R L836R D911R I926R |
| 26 | D581R L836R S879R |
| 27 | D581R L836R D911R |
| 28 | D581R S879R |
| 29 | L836R D911R I926R |
| 30 | D581R L836R S879R D911R |
| 31 | L589R L836R S879R D911R |
| 32 | D581 D835G D911R I926R |
| 33 | D581R D911R I926R V1030G |
| 34 | D581R D911R I926R S1046G |
| 35 | D835G L836R D911R |
| 36 | L836R D911R V1030G |
| 37 | L836R D911R S1046G |
| 38 | D581R D835G L836R D911R I926R |
| 39 | D581R L836R D911R I926R V1030G |
| 40 | D581R L836R D911R I926R S1046G |
| 41 | D581R D835G S879R |
| 42 | L836R D911R I926R V1030G |
| 43 | D581R L836R S879R S1046G |
| 44 | D581R L836R S879R D911R S1046G |
| 45 | L836R D911R I926R S1046G |
| 46 | D581R P868R I926R V1030G |
| 47 | D581R P868R I926R V1030G S1046G |
| 48 | D581R P868R D911R I926R V1030G |
| 49 | D581R D911R I926R V1030G S1046G |
| 50 | D581R P868R D911R I926R V1030G S1046G |
| 51 | D581K D911R I926R V1030G |
| 52 | D581N D911R I926R V1030G |
| 53 | D581H D911R I926R V1030G |
| 54 | D581R D911R I926K V1030G |
| 55 | D581R D911R I926N V1030G |
| 56 | D581R D911R I926H V1030G |
| 57 | D581R D911R I926R V1030K |
| 58 | D581R D911R I926R V1030N |
| 59 | D581R D911R I926R V1030H |
| 60 | D581R G587R D911R I926R V1030G |
| 61 | D581R L623R D911R I926R V1030G |
| 62 | D581R G624R D911R I926R V1030G |
| 63 | D581R F626R D911R I926R V1030G |
| 64 | D581R G633R D911R I926R V1030G |
| 55 | D581R L654R D911R I926R V1030G |
| 66 | D581R Q674R D911R I926R V1030G |
| 67 | D581R T676R D911R I926R V1030G |
| 68 | D581R K677R D911R I926R V1030G |
| 69 | D581R N679G D911R I926R V1030G |
| 70 | D581R A689G D911R I926R V1030G |
| 71 | D581R K692G D911R I926R V1030G |
| 72 | D581R Q727G D911R I926R V1030G |
| 73 | D581R Q728G D911R I926R V1030G |
| 74 | D581R Q739G D911R I926R V1030G |
| 75 | D581R L754G D911R I926R V1030G |
| 76 | D581R T756G D911R I926R V1030G |
| 77 | D581R G762R D911R I926R V1030G |
| 78 | D581R K776R D911R I926R V1030G |
| 79 | D581R L801R D911R I926R V1030G |
| 80 | D581R R803G D911R I926R V1030G |
| 81 | D581R S817G D911R I926R V1030G |
| 82 | D581R L823R D911R I926R V1030G |
| 83 | D581R N826R D911R I926R V1030G |
| 84 | D581R G834R D911R I926R V1030G |
| 85 | D581R S837G D911R I926R V1030G |
| 86 | D581R S837R D911R I926R V1030G |
| 87 | D581R T838R D911R I926R V1030G |
| 88 | D581R T839R D911R I926R V1030G |
| 89 | D581R H870R D911R I926R V1030G |
| 90 | D581R G876R D911R I926R V1030G |
| 91 | D581R G878R D911R I926R V1030G |
| 92 | D581R Y881R D911R I926R V1030G |
| 93 | D581R D886R D911R I926R V1030G |
| 94 | D581R P887R D911R I926R V1030G |
| 95 | D581R V889R D911R I926R V1030G |
| 96 | D581R D894R D911R I926R V1030G |
| 97 | D581R K895R D911R I926R V1030G |
| 98 | D581R D911R I926R G929R V1030G |
| 99 | D581R D911R I926R E930R V1030G |
| 100 | D581R D911R I926R L948R V1030G |
| 101 | D581R D911R I926R E949R V1030G |
| 102 | D581R D911R I926R E950R V1030G |
| 103 | D581R D911R I926R P964R V1030G |
| 104 | D581R D911R I926R K979R V1030G |
| 105 | D581R D911R I926R A1018R V1030G |
| 106 | D581R D911R I926R D1019R V1030G |
| 107 | D581R D911R I926R V1021R V1030G |
| 108 | D581R D911R I926R A1022R V1030G |
| 109 | D581R D911R I926R N1025R V1030G |
| 110 | D581R D911R I926R V1030R |
| 111 | D581R D911R I926R V1030G G1032R |
| 112 | D581R D911R I926R V1030G E1035R |
| 113 | D581R D911R I926R V1030G S1037R |
| 114 | D581R G834R D911R N925R I926R E930R V1030G E1035R |
| 115 | D581R G834R D911R N925R I926R V1030G |
| 116 | D581R G834R D911R I926R E930R V1030G |
| 117 | D581R G834R D911R I926R V1030G E1035R |
| 118 | D581R D911R N925R I926R V1030G E1035R |
| 119 | D581R G834R D911R N925R I926R E930R V1030R E1035R |
| 120 | D581R G834R D911R N925R I926R V1030R |
| 121 | D581R G834R D911R I926R E930R V1030R |
| 122 | D581R G834R D911R I926R V1030R E1035R |
| 123 | D581R D911R N925R I926R V1030R E1035R |
| 124 | D581R G624R G834R D911R N925R I926R E930R V1030G E1035R |
| 125 | D581R L623R G624R L654R L801R G834R P868R G876R S883R K895R D911R |
| | N925R I926R E930R L948R K979R A1022R V1030G E1035R |
| 126 | D581R G587R L623R G624R F626R L654R Q674R K677R L801R G834R S837R |
| | T838R P868R G876R Y881R S883R D886R D894R K895R D911R N925R I926R |
| | E930R L948R E949R K979R A1022R V1030G E1035R |
| 127 | D581R G624R G834R N925R I926R E930R V1030G E1035R |
| 128 | D581R L623R G624R L654R L801R G834R P868R G876R S883R K895R N925R |
| | I926R E930R L948R K979R A1022R V1030G E1035R |
| 129 | D581R G587R L623R G624R F626R L654R Q674R K677R L801R G834R S837R |
| | T838R P868R G876R Y881R S883R D886R D894R K895R N925R I926R E930R |
| | L948R E949R K979R A1022R V1030G E1035R |
| 130 | R575H |
| 131 | Q645R |
| 132 | D581R G587R D911R V1030G S1046G |
| 133 | D581R G624R D911R V1030G S1046G |
| 134 | D581R F626R D911R V1030G S1046G |
| 135 | D581R D911R V1030G E1035R S1046G |
| 136 | D581R G587R G624R D911R V1030G S1046G |
| 137 | D581R G587R F626R D911R V1030G S1046G |
| 138 | D581R G587R D911R V1030G E1035R S1046G |
| 139 | D581R G624R F626R D911R V1030G S1046G |
| 140 | D581R G624R D911R V1030G E1035R S1046G |
| 141 | D581R F626R D911R V1030G E1035R S1046G |
| 142 | D581R G587R G624R F626R D911R V1030G S1046G |
| 143 | D581R G587R G624R D911R V1030G E1035R S1046G |
| 144 | D581R G587R F626R D911R V1030G E1035R S1046G |
| 145 | D581R G624R F626R D911R V1030G E1035R S1046G |
| 146 | D581R G587R G624R F626R D911R V1030G E1035R S1046G |
| 495 | D581R G624R F626R I926R V1030G E1035R S1046G |
| 496 | D581R G624R F626R P868T I926R V1030G E1035R S1046G |
| 497 | D581K I926R V1030G S1046G G587R F626R |
| 498 | D581K I926R V1030G S1046G G587R G624R |
| 499 | D581R I926R V1030G S1046G G587R G624R F626R |
| 500 | D581R I926R V1030G S1046G G587R G624R F626R V967K |
| 501 | D581R I926R V1030G S1046G L855Q |
| 502 | D581R I926R V1030G S1046G H870S |
| 503 | D581R I926R V1030G S1046G A867Q |
| 504 | D581R I926R V1030G S1046G V859T |
| 505 | D581R I926R V1030G S1046G P868T |
| 506 | D581R I926R V1030G S1046G R857S |
| 507 | D581R I926R V1030G S1046G N871P |
| 508 | D581R I926R V1030G S1046G R850L |
| 509 | D581R I926R V1030G S1046G Q602L |
| 510 | D581R I926R V1030G S1046G M869L |
| 511 | D581R I926R V1030G S1046G L880W |
| 512 | D581R I926R V1030G S1046G M869W |

[0503] In some embodiments, the variant Cas12i2 polypeptide is a polypeptide shown in Table 3. The substitutions in Table 3 are relative to the sequence of SEQ ID NO: 2. In some embodiments, a variant Cas12i2 polypeptide comprises one or more of the amino acid substitutions listed in Table 3.

[0504] In some embodiments, the variant Cas12i2 polypeptide of the present invention comprises a polypeptide sequence having 50%, 60%, 65%, 70%, 75%, 80%, 85%, 90%, 91%, 92%, 93%, 94%, 95%, 96%, 97%, 98%, 99%, or 100% identity to any one of SEQ ID NOs: 3-146 and 495-512. In some embodiments, the variant Cas12i2 polypeptide of the present invention comprises a polypeptide sequence having greater than 50%, 60%, 65%, 70%, 75%, 80%, 85%, 90%, 91%, 92%, 93%, 94%, 95%, 96%, 97%, 98%, 99%, or 100% identity to any one of SEQ ID NOs: 3-146 and 495-512.

[0505] In some embodiments, one or more amino acids between amino acids 597 to 607 of SEQ ID NO: 2 is altered or mutated. In some embodiments, one or more amino acids between amino acids 597 to 604 of SEQ ID NO: 2 is altered or mutated. In some embodiments, one or more amino acids between amino acids 830 to 833 of SEQ ID NO: 2 is altered or mutated. In some embodiments, one or more amino acids between amino acids 829 to 835 of SEQ ID NO: 2 is altered or mutated. In some embodiments, one or more amino acids between amino acids 882 to 888 of SEQ ID NO: 2 is altered or mutated. In some embodiments, one or more amino acids between amino acids 883 to 889 of SEQ ID NO: 2 is altered or mutated. See Table 2.

[0506] In some embodiments, one or more amino acids between amino acids 600 to 607 of SEQ ID NO: 2 is altered or mutated. In some embodiments, one or more amino acids between amino acids 833 to 871 of SEQ ID NO: 2 is altered or mutated. In some embodiments, one or more amino acids between amino acids 877 to 885 of SEQ ID NO: 2 is altered or mutated. See Table 2.

[0507] In some embodiments, the variant Cas12i2 polypeptide comprises at least one RuvC domain. In some embodiments, the variant Cas12i2 polypeptide comprises at least one RuvC motif (e.g., one, two or three RuvC motifs). The domains of Cas12i2 polypeptides disclosed herein are depicted in FIG. 19. The Wedge domain comprises residues 1-14 and 442-586 of the Cas12i2 polypeptide. The Rec1 domain comprises residues 15-176 and 270-441 of the Cas12i2 polypeptide. Within the Rec1 domain, the Helical I domain comprises residues 15-176 and 270-327, and the Helical II domain comprises residues 328-441. The PI domain comprises residues 177-269 of the Cas12i2 polypeptide. The Rec2 domain comprises residues 638-828 of the Cas12i2 polypeptide. The Nuc domain comprises residues 880-1017 of the Cas12i2 polypeptide. The RuvC motif comprises residues 587-637 (RuvC1), residues 829-879 (RuvC2), and residues 1018-1054 (RuvC3) of the Cas12i2 polypeptide.

[0508] In some embodiments, the variant Cas12i2 polypeptide having a feature as described herein comprises an amino acid sequence having at least about 60%, 65%, 70%, 75%, 80%, 85%, 90%, 91%, 92%, 93%, 94%, 95%, 96%, 97%, 98%, 99%, or 100% identity to any one of SEQ ID NOs: 3-146 and 495-512.

[0509] Although the changes described herein may be one or more amino acid changes, changes to the variant Cas12i2 polypeptide may also be of a structural or substantive nature, such as fusion of polypeptides as amino- and/or carboxyl-terminal extensions. For example, variant Cas12i2 polypeptide may contain additional peptides, e.g., one or more peptides. Examples of additional peptides may include epitope peptides for labelling, such as a polyhistidine tag (His-tag), Myc, and FLAG. In some embodiments, the variant Cas12i2 polypeptide described herein can be fused to a detectable moiety such as a fluorescent protein (e.g., green fluorescent protein (GFP) or yellow fluorescent protein (YFP)).

[0510] In some embodiments, the variant Cas12i2 polypeptide comprises at least one (e.g., two, three, four, five, six, or more) nuclear localization signal (NLS). In some embodiments, the variant Cas12i2 polypeptide comprises at least one (e.g., two, three, four, five, six, or more) nuclear export signal (NES). In some embodiments, the variant Cas12i2 polypeptide comprises at least one (e.g., two, three, four, five, six, or more) NLS and at least one (e.g., two, three, four, five, six, or more) NES.

[0511] In some embodiments, the variant Cas12i2 polypeptide described herein can be self-inactivating. See, Epstein et al., “Engineering a Self-Inactivating CRISPR System for AAV Vectors,” Mol. Ther., 24 (2016): S50, which is incorporated by reference in its entirety.

[0512] In some embodiments, the nucleotide sequence encoding the variant Cas12i2 polypeptide described herein can be codon-optimized for use in a particular host cell or organism. For example, the nucleic acid can be codon-optimized for any non-human eukaryote including mice, rats, rabbits, dogs, livestock, or non-human primates. Codon usage tables are readily available, for example, at the “Codon Usage Database” available at www.kazusa.orjp/codon/and these tables can be adapted in a number of ways. See Nakamura et al. Nucl. Acids Res. 28:292 (2000), which is incorporated herein by reference in its entirety. Computer algorithms for codon optimizing a particular sequence for expression in a particular host cell are also available, such as Gene Forge (Aptagen; Jacobus, PA).

### Functionality of Variant Polypeptides

[0513] As used herein, a “biologically active portion” is a portion that retains at least one function (e.g. completely, partially, minimally) of the parent polypeptide (e.g., a “minimal” or “core” domain). In some embodiments, the variant Cas12i2 polypeptide retains enzymatic activity at least as active as the parent polypeptide. Accordingly, in some embodiments, a variant Cas12i2 polypeptide has enzymatic activity greater than the parent polypeptide.

[0514] Also provided is a variant Cas12i2 polypeptide of the present invention having enzymatic activity, e.g., nuclease or endonuclease activity, and comprising an amino acid sequence which differs from the amino acid sequences of any one of a parent polypeptide and SEQ ID NO: 2 by 50, 40, 35, 30, 25, 20, 19, 18, 17, 16, 15, 14, 13, 12, 11, 10, 9, 8, 7, 6, 5, 4, 3, 2, or 1 amino acid residue(s), when aligned using any of the previously described alignment methods. In some embodiments, the variant Cas12i2 polypeptide having enzymatic activity comprises an amino acid sequence having at least about 60%, 65%, 70%, 75%, 80%, 85%, 90%, 91%, 92%, 93%, 94%, 95%, 96%, 97%, 98%, 99%, or 100% identity to the amino acid sequences of any one of a parent polypeptide and SEQ ID NO: 2, when aligned using any of the previously described alignment methods.

[0515] In some aspects, the variant Cas12i2 polypeptide comprises at least one alteration or mutation that enhances enzymatic activity, RNA guide complex (binary complex) formation, RNA guide binding activity, RNA guide affinity, RNA guide binding specificity, protein-RNA interactions, protein-DNA interactions, protein stability, ternary complex formation, on-target binding activity, on-target binding specificity, and/or stability in a ternary complex of the variant Cas12i2 polypeptide. In some embodiments, the variant Cas12i2 polypeptide of the present invention has at least one of enzymatic activity, RNA guide complex (binary complex) formation, RNA guide binding activity, RNA guide affinity, RNA guide binding specificity, protein-RNA interactions, protein-DNA interactions, protein stability, ternary complex formation, on-target binding activity, on-target binding specificity, and/or stability in a ternary complex equivalent to or greater than the parent polypeptide. In some embodiments, the variant Cas12i2 polypeptide comprises at least one alteration or mutation that enhances enzymatic activity, RNA guide complex (binary complex) formation, RNA guide binding activity, RNA guide affinity, RNA guide binding specificity, protein-RNA interactions, protein-DNA interactions, protein stability, ternary complex formation, on-target binding activity, on-target binding specificity, and/or stability in a ternary complex and the variant Cas12i2 polypeptide comprises an amino acid sequence having at least about 60%, 65%, 70%, 75%, 80%, 85%, 90%, 91%, 92%, 93%, 94%, 95%, 96%, 97%, 98%, 99%, or 100% identity to SEQ ID NO: 4.

[0516] In some embodiments, the variant Cas12i2 polypeptide comprises enhanced enzymatic activity, RNA guide complex (binary complex) formation, RNA guide binding activity, RNA guide affinity, RNA guide binding specificity, protein-RNA interactions, protein-DNA interactions, protein stability, ternary complex formation, on-target binding activity, on-target binding specificity, and/or stability in a ternary complex and the variant Cas12i2 polypeptide comprises an amino acid sequence of any one of SEQ ID NOs: 3-5, 495, or 496.

[0517] In some embodiments, the variant Cas12i2 polypeptide comprises enhanced enzymatic activity, RNA guide complex (binary complex) formation, RNA guide binding activity, RNA guide affinity, RNA guide binding specificity, protein-RNA interactions, protein-DNA interactions, protein stability, ternary complex formation, on-target binding activity, on-target binding specificity, and/or stability in a ternary complex and the variant Cas12i2 polypeptide comprises an amino acid sequence of any one of SEQ ID NOs: 3-146 and 495-512.

[0518] In some aspects of the invention, the variant Cas12i2 polypeptide comprises a substitution that alters the ability of the polypeptide to interact (e.g., bind or form a complex) with a nucleic acid (e.g., an RNA guide or DNA). In some aspects of the invention, the variant Cas12i2 polypeptide comprises a substitution that alters the affinity of the polypeptide to a nucleic acid (e.g., an RNA guide or DNA).

[0519] In some embodiments, a variant Cas12i2 polypeptide comprising a D581R substitution exhibits enhanced enzymatic activity. In some embodiments, a variant Cas12i2 polypeptide comprising a D581R substitution interacts with the NTS. In some embodiments, a variant Cas12i2 polypeptide comprising a D581R substitution interacts with the PAM sequence backbone. In some embodiments, a variant Cas12i2 polypeptide comprising a D581R substitution exhibits enhanced electrostatic interactions with DNA at the PAM sequence. In some embodiments, a variant Cas12i2 polypeptide comprising a D581R substitution decreases repulsive interactions with nucleic acids. In some embodiments, a variant Cas12i2 polypeptide comprising a D581R substitution enhances R-loop stability. See FIG. 20A.

[0520] In some embodiments, a variant Cas12i2 polypeptide comprising a V1030G substitution exhibits enhanced enzymatic activity. In some embodiments, a variant Cas12i2 polypeptide comprising a V1030G substitution interacts with the NTS. In some embodiments, a variant Cas12i2 polypeptide comprising a V1030G substitution is near the Cas12i2 active site. See FIG. 20B.

[0521] In some embodiments, a variant Cas12i2 polypeptide comprising an I926R substitution exhibits enhanced enzymatic activity. In some embodiments, a variant Cas12i2 polypeptide comprising a I926R substitution interacts with the single-stranded DNA near the Cas12i2 active site. In some embodiments, a variant Cas12i2 polypeptide comprising a I926R substitution stabilizes single-stranded DNA. See FIG. 20B.

[0522] In some embodiments, a variant Cas12i2 polypeptide comprising a G624R substitution exhibits enhanced enzymatic activity. In some embodiments, a variant Cas12i2 polypeptide comprising a G624R substitution interacts with the NTS. In some embodiments, a variant Cas12i2 polypeptide comprising a G624R substitution enhances R-loop stability.

[0523] In some embodiments, a variant Cas12i2 polypeptide comprising a F626R substitution exhibits enhanced enzymatic activity. In some embodiments, a variant Cas12i2 polypeptide comprising a F626R substitution interacts with the NTS. In some embodiments, a variant Cas12i2 polypeptide comprising a F626R substitution enhances R-loop stability.

[0524] In some embodiments, the variant Cas12i2 polypeptide of the present invention has at least one of enzymatic activity, RNA guide complex (binary complex) formation, RNA guide binding activity, RNA guide affinity, RNA guide binding specificity, protein-RNA interactions, protein-DNA interactions, protein stability, ternary complex formation, on-target binding activity, on-target binding specificity, and/or stability in a ternary complex at a temperature range from about 20° C. to about 90° C., e.g., about any one of 20° C., 21° C., 22° C., 23° C., 24° C., 25° C., 26° C., 27° C., 28° C., 29° C., 30° C., 31° C., 32° C., 33° C., 34° C., 35° C., 36° C., 37° C., 38° C., 39° C., 40° C., 41° C., 42° C., 43° C., 44° C., 45° C., 50° C., 51° C., 52° C., 53° C., 54° C., 55° C., 56° C., 57° C., 58° C., 59° C., 60° C., 65° C. or greater. In some embodiments, the variant Cas12i2 polypeptide of the present invention has at least one of enzymatic activity, RNA guide complex (binary complex) formation, RNA guide binding activity, RNA guide affinity, RNA guide binding specificity, protein-RNA interactions, protein-DNA interactions, protein stability, ternary complex formation, on-target binding activity, on-target binding specificity, and/or stability in a ternary complex at a temperature of about 20° C. to about 25° C. or at a temperature of about 37° C.

[0525] In some embodiments, the variant Cas12i2 polypeptide exhibits enhanced enzymatic activity, RNA guide complex (binary complex) formation, RNA guide binding activity, RNA guide affinity, RNA guide binding specificity, protein-RNA interactions, protein-DNA interactions, protein stability, ternary complex formation, on-target binding activity, on-target binding specificity, and/or stability in a ternary complex, as compared to a parent polypeptide, in a buffer having a pH in a range of about 7.3 to about 8.6 (e.g., 7.3, 7.4, 7.5, 7.6, 7.7, 7.8, 7.9, 8.0, 8.1, 8.2, 8.3, 8.4, 8.5, 8.6, or any value within a range between any combination of these values).

[0526] In some embodiments, the variant Cas12i2 polypeptide exhibits at least one of enzymatic activity, RNA guide complex (binary complex) formation, RNA guide binding activity, RNA guide affinity, RNA guide binding specificity, protein-RNA interactions, protein-DNA interactions, protein stability, ternary complex formation, on-target binding activity, on-target binding specificity, and/or stability in a ternary complex, as compared to a parent polypeptide, when the Tₘ value of the variant Cas12i2 polypeptide is at least 1° C., 2° C., 3° C., 4° C., 5° C., 6° C., 7° C., 8° C., 9° C., 10° C., 11° C., 12° C., 13° C., 14° C., 15° C., 16° C., 17° C., 18° C., 19° C., or 20° C. greater than the Tₘ value of a parent polypeptide. In one embodiment, the variant Cas12i2 polypeptide exhibits enhanced enzymatic activity, RNA guide complex (binary complex) formation, RNA guide binding activity, RNA guide affinity, RNA guide binding specificity, protein-RNA interactions, protein-DNA interactions, protein stability, ternary complex formation, on-target binding activity, on-target binding specificity, and/or stability in a ternary complex when the Tₘ value of the variant Cas12i2 polypeptide is at least 8° C. greater than the Tₘ value of the parent polypeptide.

[0527] In some embodiments, the variant Cas12i2 polypeptide of the present invention exhibits increased at least one of enzymatic activity, RNA guide complex (binary complex) formation, RNA guide binding activity, RNA guide affinity, RNA guide binding specificity, protein-RNA interactions, protein-DNA interactions, protein stability, ternary complex formation, on-target binding activity, on-target binding specificity, and/or stability in a ternary complex at about 37° C. over an incubation period of at least about any one of 10 mins, 15 mins, 20 mins, 25 mins, 30 mins, 35 mins, 40 mins, 45 mins, 50 mins, 55 mins, 1 hr, 2 hr, 3 hr, 4 hr, or more hours as compared to a parent polypeptide. In some embodiments, a variant Cas12i2 polypeptide of the present invention exhibits increased at least one of enzymatic activity, RNA guide complex (binary complex) formation, RNA guide binding activity, RNA guide affinity, RNA guide binding specificity, protein-RNA interactions, protein-DNA interactions, protein stability, ternary complex formation, on-target binding activity, on-target binding specificity, and/or stability in a ternary complex over a range of incubation times as compared to a parent polypeptide.

[0528] Also provided is a variant Cas12i2 polypeptide of the present invention having decreased dissociation from the RNA guide (dissociation of a binary complex), dissociation from a target nucleic acid (dissociation of a ternary complex), off-target binding to a non-target nucleic acid, and/or activity at a non-target locus of a target nucleic acid and comprising an amino acid sequence which differs from the amino acid sequences of any one of a parent polypeptide and SEQ ID NO: 2 by 50, 40, 35, 30, 25, 20, 19, 18, 17, 16, 15, 14, 13, 12, 11, 10, 9, 8, 7, 6, 5, 4, 3, 2, or 1 amino acid residue(s), when aligned using any of the previously described alignment methods. In some embodiments, the variant Cas12i2 polypeptide having decreased dissociation from the RNA guide (dissociation of a binary complex), dissociation from a target nucleic acid (dissociation of a ternary complex), off-target binding to a non-target nucleic acid, and/or activity at a non-target locus of a target nucleic acid comprises an amino acid sequence having at least about 60%, 65%, 70%, 75%, 80%, 85%, 90%, 91%, 92%, 93%, 94%, 95%, 96%, 97%, 98%, 99%, or 100% identity to the amino acid sequences of any one of a parent polypeptide and SEQ ID NO: 2, when aligned using any of the previously described alignment methods.

[0529] In some aspects, the variant Cas12i2 polypeptide comprises at least one alteration or mutation that decreased dissociation from the RNA guide (dissociation of a binary complex), dissociation from a target nucleic acid (dissociation of a ternary complex), off-target binding to a non-target nucleic acid, and/or activity at a non-target locus of a target nucleic acid of the variant Cas12i2 polypeptide. In some embodiments, the variant Cas12i2 polypeptide comprises at least one alteration or mutation that decreased dissociation from the RNA guide (dissociation of a binary complex), dissociation from a target nucleic acid (dissociation of a ternary complex), off-target binding to a non-target nucleic acid, and/or activity at a non-target locus of a target nucleic acid and the variant Cas12i2 polypeptide comprises an amino acid sequence having at least about 60%, 65%, 70%, 75%, 80%, 85%, 90%, 91%, 92%, 93%, 94%, 95%, 96%, 97%, 98%, 99%, or 100% identity to SEQ ID NO: 4.

[0530] In some aspects, the variant Cas12i2 polypeptide comprises at least one alteration or mutation that decreases dissociation from the RNA guide (dissociation of a binary complex), dissociation from a target nucleic acid (dissociation of a ternary complex), off-target binding to a non-target nucleic acid, and/or activity at a non-target locus of a target nucleic acid as compared to a parent polypeptide. In some aspects, the variant Cas12i2 polypeptide comprises decreased dissociation from the RNA guide (dissociation of a binary complex), dissociation from a target nucleic acid (dissociation of a ternary complex), off-target binding to a non-target nucleic acid, and/or activity at a non-target locus of a target nucleic acid as compared to a parent polypeptide and the variant Cas12i2 polypeptide comprises an amino acid sequence of any one of SEQ ID NOs: 3-5, 495, or 496.

[0531] In some aspects, the variant Cas12i2 polypeptide comprises decreased dissociation from the RNA guide (dissociation of a binary complex), dissociation from a target nucleic acid (dissociation of a ternary complex), off-target binding to a non-target nucleic acid, and/or activity at a non-target locus of a target nucleic acid as compared to a parent polypeptide and the variant Cas12i2 polypeptide comprises an amino acid sequence of any one of SEQ ID NOs: 3-146 and 495-512.

[0532] In some embodiments, the variant Cas12i2 polypeptide of the present invention exhibits at least one of dissociation from the RNA guide (dissociation of a binary complex), dissociation from a target nucleic acid (dissociation of a ternary complex), off-target binding to a non-target nucleic acid, and/or activity at a non-target locus of a target nucleic acid at equivalent to or less levels than the parent polypeptide. In some embodiments, the variant Cas12i2 polypeptide of the present invention has equivalent to or decreased dissociation from the RNA guide (dissociation of a binary complex), dissociation from a target nucleic acid (dissociation of a ternary complex), off-target binding to a non-target nucleic acid, and/or activity at a non-target locus of a target nucleic acid at a temperature range from about 20° C. to about 90° C., e.g., about any one of 20° C., 21° C., 22° C., 23° C., 24° C., 25° C., 26° C., 27° C., 28° C., 29° C., 30° C., 31° C., 32° C., 33° C., 34° C., 35° C., 36° C., 37° C., 38° C., 39° C., 40° C., 41° C., 42° C., 43° C., 44° C., 45° C., 50° C., 51° C., 52° C., 53° C., 54° C., 55° C., 56° C., 57° C., 58° C., 59° C., 60° C., 65° C. or greater. In some embodiments, the variant Cas12i2 polypeptide of the present invention performs at least one of dissociation from the RNA guide (dissociation of a binary complex), dissociation from a target nucleic acid (dissociation of a ternary complex), off-target binding to a non-target nucleic acid, and/or activity at a non-target locus of a target nucleic acid at a temperature of about 20° C. to about 25° C. or at a temperature of about 37° C.

[0533] In some embodiments, the variant Cas12i2 polypeptide exhibits decreased dissociation from the RNA guide (dissociation of a binary complex), dissociation from a target nucleic acid (dissociation of a ternary complex), off-target binding to a non-target nucleic acid, and/or activity at a non-target locus of a target nucleic acid, as compared to a parent polypeptide, in a buffer having a pH in a range of about 7.3 to about 8.6 (e.g., 7.3, 7.4, 7.5, 7.6, 7.7, 7.8, 7.9, 8.0, 8.1, 8.2, 8.3, 8.4, 8.5, 8.6, or any value within a range between any combination of these values).

[0534] In some embodiments, the variant Cas12i2 polypeptide exhibits at least one of dissociation from the RNA guide (dissociation of a binary complex), dissociation from a target nucleic acid (dissociation of a ternary complex), off-target binding to a non-target nucleic acid, and/or activity at a non-target locus of a target nucleic acid, as compared to a parent polypeptide, when the Tₘ value of the variant Cas12i2 polypeptide is at least 1° C., 2° C., 3° C., 4° C., 5° C., 6° C., 7° C., 8° C., 9° C., 10° C., 11° C., 12° C., 13° C., 14° C., 15° C., 16° C., 17° C., 18° C., 19° C., or 20° C. greater than the Tₘ value of a parent polypeptide. In one embodiment, the variant Cas12i2 polypeptide exhibits decreased dissociation from the RNA guide (dissociation of a binary complex), dissociation from a target nucleic acid (dissociation of a ternary complex), off-target binding to a non-target nucleic acid, and/or activity at a non-target locus of a target nucleic acid when the Tₘ value of the variant Cas12i2 polypeptide is at least 8° C. greater than the Tₘ value of the parent polypeptide.

### Increased RNA Guide Interactions

[0535] In some embodiments, the variant Cas12i2 polypeptide comprises an alteration that increases interactions and/or affinity between the variant Cas12i2 polypeptide and the RNA guide, as compared to a parent polypeptide. See FIG. 20C. In some embodiments, the alteration that increases interactions and/or affinity between the variant Cas12i2 polypeptide and the RNA guide is substituting one or more amino acids to an arginine, lysine, glutamine, asparagine, histidine, serine, or tyrosine residue. In some embodiments, the variant Cas12i2 polypeptide comprises a substitution of one or more amino acids in the RNA binding interface to an arginine, lysine, glutamine, asparagine, histidine, serine, or tyrosine residue. In some embodiments, the variant Cas12i2 polypeptide comprises a substitution of one or more amino acids 441-586 or 637-828 to any one of an arginine, lysine, glutamine, asparagine, histidine, serine, or tyrosine residue. In some embodiments, the variant Cas12i2 polypeptide comprises an alteration of one or more amino acids in at least one domain (e.g., the Wedge domain or Rec2 domain) to an arginine, lysine, glutamine, asparagine, histidine, serine, or tyrosine residue. In some embodiments, the RNA binding interface substitution(s) increases RNA guide binding or RNA guide binding affinity by about 4%, 5%, 6%, 7%, 8%, 9%, 10%, 11%, 12%, 13%, 14%, 15%, 16%, 17%, 18%, 19%, 20%, 21%, 22%, 23%, 24%, 25%, 26%, 27%, 28%, 29%, 30%, 31%, 32%, 33%, 34%, 35%, 36%, 37%, 38%, 39%, 40%, 41%, 42%, 43%, 44%, 45%, 46%, 47%, 48%, 49%, 50%, 51%, 52%, 53%, 54%, 55%, 56%, 57%, 58%, 59%, 60%, 61%, 62%, 63%, 64%, 65%, 66%, 67%, 68%, 69%, 70%, 71%, 72%, 73% 74%, 75%, 76%, 77%, 78%, 79%, 80%, 81%, 82%, 83%, 84%, 85%, 86%, 87%, 88%, 89%, 90%, 91%, 92%, 93%, 94%, 95%, 96%, 97%, 98%, 99%, 100%, 110%, 120%, 130%, 140%, 150%, 160%, 170%, 180%, 190%, 200%, or more or any percentage therebetween, as compared to a parent polypeptide.

[0536] In some embodiments, the substitution increases RNA guide complex (binary complex) formation relative to a parent polypeptide. Non-limiting examples of substitutions that can alter the ability of a variant Cas12i2 polypeptide to interact with the direct repeat sequence of an RNA guide are shown in Table 4. In some embodiments, a variant Cas12i2 polypeptide comprising one or more substitutions listed in Table 4 exhibits enhanced RNA guide complex (binary complex) formation relative to a parent polypeptide. In some embodiments, a variant Cas12i2 polypeptide comprising one or more substitutions listed in Table 4 forms a more stable binary complex with an RNA guide, as compared to a binary complex comprising a parent polypeptide.

TABLE 4
Substitutions increasing direct repeat sequence contact.

| Residue | Substitution(s) |
|---|---|
| N459 | R, K, H |
| T513 | N |
| P514 | Q |
| H519 | R, K |
| V536 | N |
| T541 | R, Y |
| E542 | Q, K |
| F646 | Y, R, H, Q |
| Y651 | H, R, K, Q |
| L654 | N, Q |
| L703 | N |
| C741 | N, S |
| L749 | N |
| L801 | R, K |
| T804 | K, R, Q |
| E812 | Q |
| A815 | R |
| N816 | H |
| Q820 | K, R |

[0537] In some embodiments, a variant Cas12i2 polypeptide of any one of SEQ ID NOs: 3-146 and 495-512 further comprises one or more substitutions listed in Table 4. In some embodiments, a variant Cas12i2 polypeptide comprises one or more substitutions listed in Table 2 and Table 4.

[0538] In some embodiments, a variant Cas12i2 polypeptide exhibiting enhanced RNA guide complex (binary complex) formation comprises two or more substitutions, e.g., L654K Q658A, L520K Q496N, or L520K Q496S. In some embodiments, a variant Cas12i2 polypeptide of any one of SEQ ID NOs: 3-146 and 495-512 further comprises L654K Q658A, L520K Q496N, or L520K Q496S substitutions. In some embodiments, a variant Cas12i2 polypeptide of any one of SEQ ID NOs: 3-146 and 495-512 further comprises L654K Q658A, L520K Q496N, or L520K Q496S substitutions and one or more substitutions listed in Table 4.

[0539] In some embodiments, the variant Cas12i2 polypeptide of any one of SEQ ID NOs: 3-146 and 495-512 comprising one or more substitutions listed in Table 4 exhibits increased enzymatic activity. In some embodiments, the variant Cas12i2 polypeptide comprising one or more substitutions listed in Table 4 exhibits increased enzymatic activity. In some embodiments, the variant Cas12i2 polypeptide of any one of SEQ ID NOs: 3-146 and 495-512 that further comprises L654K Q658A, L520K Q496N, or L520K Q496S substitutions and one or more substitutions listed in Table 4 exhibits increased enzymatic activity. In some embodiments, the variant Cas12i2 polypeptide exhibits increased enzymatic activity (e.g., by about 4%, 5%, 6%, 7%, 8%, 9%, 10%, 11%, 12%, 13%, 14%, 15%, 16%, 17%, 18%, 19%, 20%, 21%, 22%, 23%, 24%, 25%, 26%, 27%, 28%, 29%, 30%, 31%, 32%, 33%, 34%, 35%, 36%, 37%, 38%, 39%, 40%, 41%, 42%, 43%, 44%, 45%, 46%, 47%, 48%, 49%, 50%, 51%, 52%, 53%, 54%, 55%, 56%, 57%, 58%, 59%, 60%, 61%, 62%, 63%, 64%, 65%, 66%, 67%, 68%, 69%, 70%, 71%, 72%, 73% 74%, 75%, 76%, 77%, 78%, 79%, 80%, 81%, 82%, 83%, 84%, 85%, 86%, 87%, 88%, 89%, 90%, 91%, 92%, 93%, 94%, 95%, 96%, 97%, 98%, 99%, 100%, 110%, 120%, 130%, 140%, 150%, 160%, 170%, 180%, 190%, 200%, or more or any percentage therebetween) as compared to a parent polypeptide.

### Increased Double-Stranded DNA Interactions

[0540] In some aspects, a variant Cas12i2 polypeptide comprises an alteration that increases interactions with double-stranded DNA relative to a parent polypeptide. In some embodiments, increased interactions with double-stranded DNA are increased electrostatic interactions. In some embodiments, the variant Cas12i2 polypeptide comprises an alteration that increases affinity between the variant Cas12i2 polypeptide and double-stranded DNA relative to a parent polypeptide. In some embodiments, the alteration that increases interactions and/or affinity between the variant Cas12i2 polypeptide and double-stranded DNA increases binding of the variant Cas12i2 polypeptide to a PAM sequence.

[0541] In some embodiments, the alteration that increases interactions and/or affinity between the variant Cas12i2 polypeptide and the double-stranded DNA is substituting one or more amino acids to an arginine, lysine, glutamine, asparagine, histidine, or serine residue. In some embodiments, the variant Cas12i2 polypeptide comprises a substitution of one or more amino acids in the double-stranded DNA binding interface to an arginine, lysine, glutamine, asparagine, histidine, or serine residue. In some embodiments, the variant Cas12i2 polypeptide comprises a substitution of one or more amino acids 140-190, 220-300, 440-480, or 560-570 to any one of an arginine, lysine, glutamine, asparagine, histidine, or serine residue. In some embodiments, the variant Cas12i2 polypeptide comprises an alteration of one or more amino acids in at least one domain (e.g., the Rec1 domain, PI domain, or Wedge domain) to an arginine, lysine, glutamine, asparagine, histidine, or serine residue. In some embodiments, the double-stranded DNA binding interface substitution(s) increase double-stranded DNA interactions and/or affinity by about 4%, 5%, 6%, 7%, 8%, 9%, 10%, 11%, 12%, 13%, 14%, 15%, 16%, 17%, 18%, 19%, 20%, 21%, 22%, 23%, 24%, 25%, 26%, 27%, 28%, 29%, 30%, 31%, 32%, 33%, 34%, 35%, 36%, 37%, 38%, 39%, 40%, 41%, 42%, 43%, 44%, 45%, 46%, 47%, 48%, 49%, 50%, 51%, 52%, 53%, 54%, 55%, 56%, 57%, 58%, 59%, 60%, 61%, 62%, 63%, 64%, 65%, 66%, 67%, 68%, 69%, 70%, 71%, 72%, 73% 74%, 75%, 76%, 77%, 78%, 79%, 80%, 81%, 82%, 83%, 84%, 85%, 86%, 87%, 88%, 89%, 90%, 91%, 92%, 93%, 94%, 95%, 96%, 97%, 98%, 99%, 100%, 110%, 120%, 130%, 140%, 150%, 160%, 170%, 180%, 190%, 200%, or more or any percentage therebetween, as compared to a parent polypeptide. In some embodiments, the double-stranded DNA binding interface substitution(s) increase binding of the variant Cas12i2 polypeptide to a PAM sequence by about 4%, 5%, 6%, 7%, 8%, 9%, 10%, 11%, 12%, 13%, 14%, 15%, 16%, 17%, 18%, 19%, 20%, 21%, 22%, 23%, 24%, 25%, 26%, 27%, 28%, 29%, 30%, 31%, 32%, 33%, 34%, 35%, 36%, 37%, 38%, 39%, 40%, 41%, 42%, 43%, 44%, 45%, 46%, 47%, 48%, 49%, 50%, 51%, 52%, 53%, 54%, 55%, 56%, 57%, 58%, 59%, 60%, 61%, 62%, 63%, 64%, 65%, 66%, 67%, 68%, 69%, 70%, 71%, 72%, 73% 74%, 75%, 76%, 77%, 78%, 79%, 80%, 81%, 82%, 83%, 84%, 85%, 86%, 87%, 88%, 89%, 90%, 91%, 92%, 93%, 94%, 95%, 96%, 97%, 98%, 99%, 100%, 110%, 120%, 130%, 140%, 150%, 160%, 170%, 180%, 190%, 200%, or more or any percentage therebetween, as compared to a parent polypeptide.

[0542] In some embodiments, the substitution that increases double-stranded DNA interactions increases ternary complex formation relative to a parent polypeptide. Non-limiting examples of substitutions that can alter the ability of a variant Cas12i2 polypeptide to interact with double-stranded DNA are shown in Table 5. In some embodiments, a variant Cas12i2 polypeptide comprising one or more substitutions listed in Table 5 exhibits increased double-stranded DNA interactions (ternary complex formation) relative to a parent polypeptide. In some embodiments, a variant Cas12i2 polypeptide comprising one or more substitutions listed in Table 5 forms a more stable ternary complex, as compared to a parent polypeptide.

TABLE 5
Substitutions altering double-stranded interactions.

| Residue | Substitution(s) |
|---|---|
| T147 | R, K |
| T174 | R, K, N, Q |
| E178 | Q, N |
| N229 | R, K |
| E237 | Q, N, S |
| Y287 | K, H |
| D288 | N, S |
| L289 | K, H, N, R |
| T447 | R, K |
| N448 | R, K, H |
| I451 | R |
| L452 | K, H |
| Y472 | R, K |
| T562 | R, K |
| E563 | R, K |
| T567 | N |

[0543] In some embodiments, a variant Cas12i2 polypeptide of any one of SEQ ID NOs: 3-146 and 495-512 further comprises one or more substitutions listed in Table 5. In some embodiments, a variant Cas12i2 polypeptide comprises one or more substitutions listed in Table 2 and Table 5.

[0544] In some embodiments, a variant Cas12i2 polypeptide exhibiting increased double-stranded DNA interactions comprises two or more substitutions, e.g., T562R E563K, T562R E563K N448K, 1451R L452K, 1451R L452K T562R E563R, 1451R L452K Y472R, N229R Q224N, or N229K Q224N. In some embodiments, a variant Cas12i2 polypeptide exhibiting increased ternary complex formation/stability comprises two or more substitutions, e.g., T562R E563K, T562R E563K N448K, 1451R L452K, 1451R L452K T562R E563R, 1451R L452K Y472R, N229R Q224N, or N229K Q224N. In some embodiments, a variant Cas12i2 polypeptide of any one of SEQ ID NOs: 3-146 and 495-512 further comprises T562R E563K, T562R E563K N448K, 1451R L452K, 1451R L452K T562R E563R, 1451R L452K Y472R, N229R Q224N, or N229K Q224N substitutions. In some embodiments, a variant Cas12i2 polypeptide of any one of SEQ ID NOs: 3-146 and 495-512 further comprises T562R E563K, T562R E563K N448K, 1451R L452K, 1451R L452K T562R E563R, 1451R L452K Y472R, N229R Q224N, or N229K Q224N substitutions and one or more substitutions listed in Table 4 and/or Table 5. In some embodiments, the variant Cas12i2 polypeptide comprises any one or more substitutions in Table 4 and/or Table 5. In some embodiments, the variant Cas12i2 polypeptide with one or more of the substitutions in Table 4 and/or Table 5 exhibits increased double-stranded DNA interactions and/or affinity (e.g., by about 4%, 5%, 6%, 7%, 8%, 9%, 10%, 11%, 12%, 13%, 14%, 15%, 16%, 17%, 18%, 19%, 20%, 21%, 22%, 23%, 24%, 25%, 26%, 27%, 28%, 29%, 30%, 31%, 32%, 33%, 34%, 35%, 36%, 37%, 38%, 39%, 40%, 41%, 42%, 43%, 44%, 45%, 46%, 47%, 48%, 49%, 50%, 51%, 52%, 53%, 54%, 55%, 56%, 57%, 58%, 59%, 60%, 61%, 62%, 63%, 64%, 65%, 66%, 67%, 68%, 69%, 70%, 71%, 72%, 73% 74%, 75%, 76%, 77%, 78%, 79%, 80%, 81%, 82%, 83%, 84%, 85%, 86%, 87%, 88%, 89%, 90%, 91%, 92%, 93%, 94%, 95%, 96%, 97%, 98%, 99%, 100%, 110%, 120%, 130%, 140%, 150%, 160%, 170%, 180%, 190%, 200%, or more or any percentage therebetween) as compared to a parent polypeptide. In some embodiments, the variant Cas12i2 polypeptide with one or more of the substitutions in Table 4 and/or Table 5 exhibits increased ternary complex formation and/or ternary complex stability (e.g., by about 4%, 5%, 6%, 7%, 8%, 9%, 10%, 11%, 12%, 13%, 14%, 15%, 16%, 17%, 18%, 19%, 20%, 21%, 22%, 23%, 24%, 25%, 26%, 27%, 28%, 29%, 30%, 31%, 32%, 33%, 34%, 35%, 36%, 37%, 38%, 39%, 40%, 41%, 42%, 43%, 44%, 45%, 46%, 47%, 48%, 49%, 50%, 51%, 52%, 53%, 54%, 55%, 56%, 57%, 58%, 59%, 60%, 61%, 62%, 63%, 64%, 65%, 66%, 67%, 68%, 69%, 70%, 71%, 72%, 73% 74%, 75%, 76%, 77%, 78%, 79%, 80%, 81%, 82%, 83%, 84%, 85%, 86%, 87%, 88%, 89%, 90%, 91%, 92%, 93%, 94%, 95%, 96%, 97%, 98%, 99%, 100%, 110%, 120%, 130%, 140%, 150%, 160%, 170%, 180%, 190%, 200%, or more or any percentage therebetween) as compared to a parent polypeptide.

[0545] In some embodiments, the variant Cas12i2 polypeptide of any one of SEQ ID NOs: 3-146 and 495-512 comprising one or more substitutions listed in Table 4 and/or Table 5 exhibits increased enzymatic activity. In some embodiments, the variant Cas12i2 polypeptide comprising one or more substitutions listed in Table 4 and/or Table 5 exhibits increased enzymatic activity. In some embodiments, the variant Cas12i2 polypeptide of any one of SEQ ID NOs: 3-146 and 495-512 that further comprises T562R E563K, T562R E563K N448K, 1451R L452K, 1451R L452K T562R E563R, 1451R L452K Y472R, N229R Q224N, or N229K Q224N substitutions and one or more substitutions listed in Table 4 and/or Table 5 exhibits increased enzymatic activity. In some embodiments, the variant Cas12i2 polypeptide exhibits increased enzymatic activity (e.g., by about 4%, 5%, 6%, 7%, 8%, 9%, 10%, 11%, 12%, 13%, 14%, 15%, 16%, 17%, 18%, 19%, 20%, 21%, 22%, 23%, 24%, 25%, 26%, 27%, 28%, 29%, 30%, 31%, 32%, 33%, 34%, 35%, 36%, 37%, 38%, 39%, 40%, 41%, 42%, 43%, 44%, 45%, 46%, 47%, 48%, 49%, 50%, 51%, 52%, 53%, 54%, 55%, 56%, 57%, 58%, 59%, 60%, 61%, 62%, 63%, 64%, 65%, 66%, 67%, 68%, 69%, 70%, 71%, 72%, 73% 74%, 75%, 76%, 77%, 78%, 79%, 80%, 81%, 82%, 83%, 84%, 85%, 86%, 87%, 88%, 89%, 90%, 91%, 92%, 93%, 94%, 95%, 96%, 97%, 98%, 99%, 100%, 110%, 120%, 130%, 140%, 150%, 160%, 170%, 180%, 190%, 200%, or more or any percentage therebetween) as compared to a parent polypeptide.

### Increased Single-Stranded DNA Interactions

[0546] In some embodiments, a variant Cas12i2 polypeptide comprises an alteration that increases interactions with single-stranded DNA relative to a parent polypeptide. In some embodiments, the variant Cas12i2 polypeptide comprises an alteration that increases affinity between the variant Cas12i2 polypeptide and double-stranded DNA relative to a parent polypeptide. In some embodiments, the single-stranded DNA comprises the non-target strand (NTS). In some embodiments, increased interactions with the single-stranded DNA (e.g., the NTS) are interactions between the PAM sequence and the active site of the variant Cas12i2 polypeptide. In some embodiments, the single-stranded DNA comprises single-stranded DNA that interacts with the variant Cas12i2 polypeptide at or near the active site of the variant Cas12i2 polypeptide. In some embodiments, an alteration that increases interactions and/or affinity between the variant Cas12i2 polypeptide and the single-stranded DNA stabilizes the R-loop. As used herein, the “R-loop” refers to a nucleic acid comprising an RNA guide paired with the target strand (TS) and the single-stranded non-target strand (NTS).

[0547] In some embodiments, the alteration that increases interactions and/or affinity between the variant Cas12i2 polypeptide and the single-stranded DNA is substituting one or more amino acids to an arginine, lysine, glutamine, asparagine, histidine, or alanine residue. In some embodiments, the variant Cas12i2 polypeptide comprises a substitution of one or more amino acids in the single-stranded DNA binding interface to an arginine, lysine, glutamine, asparagine, histidine, or alanine residue. In some embodiments, the variant Cas12i2 polypeptide comprises a substitution of one or more amino acids 230-260, 350-400, 580-630, 700-760, 830-900, or 920-1035 to any one of an arginine, lysine, glutamine, asparagine, histidine, or alanine residue. In some embodiments, the variant Cas12i2 polypeptide comprises an alteration of one or more amino acids in at least one domain/motif (e.g., the PI domain, Rec1 domain, Wedge domain, RuvC1 motif, Rec2 domain, RuvC2 motif, Nuc domain, or RuvC3 motif) to an arginine, lysine, glutamine, asparagine, histidine, or alanine residue. In some embodiments, the single-stranded DNA binding interface substitution(s) increase single-stranded DNA interactions and/or affinity by about 4%, 5%, 6%, 7%, 8%, 9%, 10%, 11%, 12%, 13%, 14%, 15%, 16%, 17%, 18%, 19%, 20%, 21%, 22%, 23%, 24%, 25%, 26%, 27%, 28%, 29%, 30%, 31%, 32%, 33%, 34%, 35%, 36%, 37%, 38%, 39%, 40%, 41%, 42%, 43%, 44%, 45%, 46%, 47%, 48%, 49%, 50%, 51%, 52%, 53%, 54%, 55%, 56%, 57%, 58%, 59%, 60%, 61%, 62%, 63%, 64%, 65%, 66%, 67%, 68%, 69%, 70%, 71%, 72%, 73% 74%, 75%, 76%, 77%, 78%, 79%, 80%, 81%, 82%, 83%, 84%, 85%, 86%, 87%, 88%, 89%, 90%, 91%, 92%, 93%, 94%, 95%, 96%, 97%, 98%, 99%, 100%, 110%, 120%, 130%, 140%, 150%, 160%, 170%, 180%, 190%, 200%, or more or any percentage therebetween, as compared to a parent polypeptide.

[0548] In some embodiments, the substitution that increases single-stranded DNA interactions increases ternary complex formation relative to a parent polypeptide. Non-limiting examples of substitutions that can alter the ability of a variant Cas12i2 polypeptide to interact with single-stranded DNA are shown in Table 6. In some embodiments, a variant Cas12i2 polypeptide comprising one or more substitutions listed in Table 6 exhibits increased single-stranded DNA interactions (ternary complex formation) relative to a parent polypeptide. In some embodiments, a variant Cas12i2 polypeptide comprising one or more substitutions listed in Table 6 forms a more stable ternary complex, as compared to a parent polypeptide.

TABLE 6
Substitutions altering single-stranded interactions.

| Residue | Substitution(s) | Contact |
|---|---|---|
| T235 | K | NTS ssDNA |
| D256 | K, N, R | NTS ssDNA |
| G360 | R, K | ssDNA (near active site) |
| D362 | K, R | ssDNA (near active site) |
| V383 | R, K | ssDNA (near active site) |
| L384 | R, K | ssDNA (near active site) |
| N390 | Q | ssDNA (near active site) |
| N391 | R, Q | ssDNA (near active site) |
| G587 | K, R | NTS ssDNA |
| T588 | R, K | NTS ssDNA |
| T603 | K, R, Q | ssDNA (near active site) |
| Y619 | R, K | NTS ssDNA |
| E622 | R, K, A | NTS ssDNA |
| E709 | R, K | ssDNA (near active site) |
| Y712 | R, K | ssDNA (near active site) |
| D716 | R, K | ssDNA (near active site) |
| S752 | R, K | ssDNA (near active site) |
| D835 | K | ssDNA (near active site) |
| N840 | K | ssDNA (near active site) |
| F876 | R, K | NTS ssDNA |
| Y881 | K, R | ssDNA (near active site) |
| H884 | K | ssDNA (near active site) |
| D894 | K, R | NTS ssDNA |
| N925 | K, R | ssDNA (near active site) |
| E930 | R, K | ssDNA (near active site) |
| S957 | R, K | ssDNA (near active site) |
| D958 | K, N, R | ssDNA (near active site) |
| V1030 | R, K | NTS ssDNA |

[0549] In some embodiments, a variant Cas12i2 polypeptide of any one of SEQ ID NOs: 3-146 and 495-512 further comprises one or more substitutions listed in Table 6. In some embodiments, a variant Cas12i2 polypeptide comprises one or more substitutions listed in Table 2 and Table 6.

[0550] In some embodiments, a variant Cas12i2 polypeptide exhibiting increased single-stranded DNA interactions comprises two or more substitutions, e.g., G587R T588R, G587R T588K, G587R T588K Q590R, or G587R T588R Q590K. In some embodiments, a variant Cas12i2 polypeptide exhibiting increased ternary complex formation/stability comprises two or more substitutions, e.g., G587R T588R, G587R T588K, G587R T588K Q590R, or G587R T588R Q590K. In some embodiments, a variant Cas12i2 polypeptide of any one of SEQ ID NOs: 3-146 and 495-512 further comprises G587R T588R, G587R T588K, G587R T588K Q590R, or G587R T588R Q590K substitutions. In some embodiments, a variant Cas12i2 polypeptide of any one of SEQ ID NOs: 3-146 and 495-512 further comprises G587R T588R, G587R T588K, G587R T588K Q590R, or G587R T588R Q590K substitutions and one or more substitutions listed in Table 4 and/or Table 5 and/or Table 6. In some embodiments, the variant Cas12i2 polypeptide comprises any one or more substitutions in Table 4 and/or Table 5 and/or Table 6. In some embodiments, the variant Cas12i2 polypeptide with one or more of the substitutions in Table 4 and/or Table 5 and/or Table 6 exhibits increased single-stranded DNA interactions and/or affinity (e.g., by about 4%, 5%, 6%, 7%, 8%, 9%, 10%, 11%, 12%, 13%, 14%, 15%, 16%, 17%, 18%, 19%, 20%, 21%, 22%, 23%, 24%, 25%, 26%, 27%, 28%, 29%, 30%, 31%, 32%, 33%, 34%, 35%, 36%, 37%, 38%, 39%, 40%, 41%, 42%, 43%, 44%, 45%, 46%, 47%, 48%, 49%, 50%, 51%, 52%, 53%, 54%, 55%, 56%, 57%, 58%, 59%, 60%, 61%, 62%, 63%, 64%, 65%, 66%, 67%, 68%, 69%, 70%, 71%, 72%, 73% 74%, 75%, 76%, 77%, 78%, 79%, 80%, 81%, 82%, 83%, 84%, 85%, 86%, 87%, 88%, 89%, 90%, 91%, 92%, 93%, 94%, 95%, 96%, 97%, 98%, 99%, 100%, 110%, 120%, 130%, 140%, 150%, 160%, 170%, 180%, 190%, 200%, or more or any percentage therebetween) as compared to a parent polypeptide. In some embodiments, the variant Cas12i2 polypeptide with one or more of the substitutions in Table 4 and/or Table 5 and/or Table 6 exhibits increased ternary complex formation and/or ternary complex stability (e.g., by about 4%, 5%, 6%, 7%, 8%, 9%, 10%, 11%, 12%, 13%, 14%, 15%, 16%, 17%, 18%, 19%, 20%, 21%, 22%, 23%, 24%, 25%, 26%, 27%, 28%, 29%, 30%, 31%, 32%, 33%, 34%, 35%, 36%, 37%, 38%, 39%, 40%, 41%, 42%, 43%, 44%, 45%, 46%, 47%, 48%, 49%, 50%, 51%, 52%, 53%, 54%, 55%, 56%, 57%, 58%, 59%, 60%, 61%, 62%, 63%, 64%, 65%, 66%, 67%, 68%, 69%, 70%, 71%, 72%, 73% 74%, 75%, 76%, 77%, 78%, 79%, 80%, 81%, 82%, 83%, 84%, 85%, 86%, 87%, 88%, 89%, 90%, 91%, 92%, 93%, 94%, 95%, 96%, 97%, 98%, 99%, 100%, 110%, 120%, 130%, 140%, 150%, 160%, 170%, 180%, 190%, 200%, or more or any percentage therebetween) as compared to a parent polypeptide.

[0551] In some embodiments, a variant Cas12i2 polypeptide comprises a substitution that increases single-stranded DNA stability (e.g., the substitution increases electrostatic interactions between single-stranded DNA and the active site of the variant Cas12i2 polypeptide). In some embodiments, the variant Cas12i2 polypeptide increases single-stranded DNA stability by about 4%, 5%, 6%, 7%, 8%, 9%, 10%, 11%, 12%, 13%, 14%, 15%, 16%, 17%, 18%, 19%, 20%, 21%, 22%, 23%, 24%, 25%, 26%, 27%, 28%, 29%, 30%, 31%, 32%, 33%, 34%, 35%, 36%, 37%, 38%, 39%, 40%, 41%, 42%, 43%, 44%, 45%, 46%, 47%, 48%, 49%, 50%, 51%, 52%, 53%, 54%, 55%, 56%, 57%, 58%, 59%, 60%, 61%, 62%, 63%, 64%, 65%, 66%, 67%, 68%, 69%, 70%, 71%, 72%, 73% 74%, 75%, 76%, 77%, 78%, 79%, 80%, 81%, 82%, 83%, 84%, 85%, 86%, 87%, 88%, 89%, 90%, 91%, 92%, 93%, 94%, 95%, 96%, 97%, 98%, 99%, 100%, 110%, 120%, 130%, 140%, 150%, 160%, 170%, 180%, 190%, 200%, or more or any percentage therebetween, as compared to a parent polypeptide. Non-limiting examples of substitutions that can alter the ability of a variant Cas12i2 polypeptide to stabilize single-stranded DNA are shown in Table 6. In some embodiments, a variant Cas12i2 polypeptide comprising one or more substitutions listed in Table 6 exhibits increased single-stranded DNA stability relative to a parent polypeptide.

[0552] In some embodiments, the variant Cas12i2 polypeptide of any one of SEQ ID NOs: 3-146 and 495-512 comprising one or more substitutions listed in Table 4 and/or Table 5 and/or Table 6 exhibits increased enzymatic activity. In some embodiments, the variant Cas12i2 polypeptide comprising one or more substitutions listed in Table 4 and/or Table 5 and/or Table 6 exhibits increased enzymatic activity. In some embodiments, the variant Cas12i2 polypeptide of any one of SEQ ID NOs: 3-146 and 495-512 that further comprises G587R T588R, G587R T588K, G587R T588K Q590R, or G587R T588R Q590K substitutions and one or more substitutions listed in Table 4 and/or Table 5 and/or Table 6 exhibits increased enzymatic activity. In some embodiments, the variant Cas12i2 polypeptide exhibits increased enzymatic activity (e.g., by about 4%, 5%, 6%, 7%, 8%, 9%, 10%, 11%, 12%, 13%, 14%, 15%, 16%, 17%, 18%, 19%, 20%, 21%, 22%, 23%, 24%, 25%, 26%, 27%, 28%, 29%, 30%, 31%, 32%, 33%, 34%, 35%, 36%, 37%, 38%, 39%, 40%, 41%, 42%, 43%, 44%, 45%, 46%, 47%, 48%, 49%, 50%, 51%, 52%, 53%, 54%, 55%, 56%, 57%, 58%, 59%, 60%, 61%, 62%, 63%, 64%, 65%, 66%, 67%, 68%, 69%, 70%, 71%, 72%, 73% 74%, 75%, 76%, 77%, 78%, 79%, 80%, 81%, 82%, 83%, 84%, 85%, 86%, 87%, 88%, 89%, 90%, 91%, 92%, 93%, 94%, 95%, 96%, 97%, 98%, 99%, 100%, 110%, 120%, 130%, 140%, 150%, 160%, 170%, 180%, 190%, 200%, or more or any percentage therebetween) as compared to a parent polypeptide.

### Increased Heteroduplex Interactions

[0553] In some embodiments, a variant Cas12i2 polypeptide comprises a substitution that increases interactions with a DNA/RNA hybrid molecule relative to a parent polypeptide. In some embodiments, the variant Cas12i2 polypeptide comprises an alteration that increases affinity between the variant Cas12i2 polypeptide and a DNA/RNA hybrid relative to a parent polypeptide. In some embodiments, the DNA/RNA hybrid molecule is a heteroduplex. As used herein, the “heteroduplex” refers to a double helix formed by the spacer of an RNA guide and the target strand (TS). As used herein, the term “seed region” refers to the TS part of the heteroduplex that is immediately downstream of the PAM sequence. The seed region comprises the first bases that pair with the RNA guide in the heteroduplex and are required for RNA-DNA binding and displacement of the TS. In some embodiments, an alteration that increases interactions and/or affinity between the variant Cas12i2 polypeptide and the heteroduplex increase non-specific nucleic acid contacts. In some embodiments, an alteration that increases interactions and/or affinity between the variant Cas12i2 polypeptide and the heteroduplex increases ternary complex formation/stability relative to a parent polypeptide.

[0554] In some embodiments, the alteration that increases interactions and/or affinity between the variant Cas12i2 polypeptide and the heteroduplex is substituting one or more amino acids to an arginine, lysine, glutamine, asparagine, histidine, or serine residue. In some embodiments, the variant Cas12i2 polypeptide comprises a substitution of one or more amino acids contacting the heteroduplex to an arginine, lysine, glutamine, asparagine, histidine, or serine residue. In some embodiments, the variant Cas12i2 polypeptide comprises a substitution of one or more amino acids 110-130, 150-170, 250-320, 340-400, 420-450, 670-720, 770-810, or 830-870 to any one of an arginine, lysine, glutamine, asparagine, histidine, or serine residue. In some embodiments, the variant Cas12i2 polypeptide comprises an alteration of one or more amino acids in at least one domain/motif (e.g., the Rec1 domain, PI domain, Rec2 domain, or RuvC2 motif) to an arginine, lysine, glutamine, asparagine, histidine, or serine residue. In some embodiments, the nucleic acid interface substitution(s) increase heteroduplex interactions and/or affinity by about 4%, 5%, 6%, 7%, 8%, 9%, 10%, 11%, 12%, 13%, 14%, 15%, 16%, 17%, 18%, 19%, 20%, 21%, 22%, 23%, 24%, 25%, 26%, 27%, 28%, 29%, 30%, 31%, 32%, 33%, 34%, 35%, 36%, 37%, 38%, 39%, 40%, 41%, 42%, 43%, 44%, 45%, 46%, 47%, 48%, 49%, 50%, 51%, 52%, 53%, 54%, 55%, 56%, 57%, 58%, 59%, 60%, 61%, 62%, 63%, 64%, 65%, 66%, 67%, 68%, 69%, 70%, 71%, 72%, 73% 74%, 75%, 76%, 77%, 78%, 79%, 80%, 81%, 82%, 83%, 84%, 85%, 86%, 87%, 88%, 89%, 90%, 91%, 92%, 93%, 94%, 95%, 96%, 97%, 98%, 99%, 100%, 110%, 120%, 130%, 140%, 150%, 160%, 170%, 180%, 190%, 200%, or more or any percentage therebetween, as compared to a parent polypeptide.

[0555] In some embodiments, the substitution that increases heteroduplex interactions increases ternary complex formation/stability relative to a parent polypeptide. Non-limiting examples of substitutions that can alter the ability of a variant Cas12i2 polypeptide to interact with the heteroduplex are shown in Table 7. In some embodiments, a variant Cas12i2 polypeptide comprising one or more substitutions listed in Table 7 exhibits increased heteroduplex interactions (ternary complex formation) relative to a parent polypeptide. In some embodiments, a variant Cas12i2 polypeptide comprising one or more substitutions listed in Table 7 forms a more stable ternary complex, as compared to a parent polypeptide.

TABLE 7
Substitutions altering heteroduplex interactions.

| Residue | Substitution(s) | Contact |
|---|---|---|
| G116 | K, N, R | Heteroduplex |
| S118 | R, K | Heteroduplex |
| Y119 | K, R | Heteroduplex |
| A156 | K, N | Heteroduplex (seed region) |
| S161 | R, K, Q | Heteroduplex (seed region) |
| N165 | R, K | Heteroduplex (seed region) |
| E294 | Q | Heteroduplex (seed region) |
| N297 | K | Heteroduplex (seed region) |
| T308 | K, R, H, N | Heteroduplex (seed region) |
| N312 | R, H, K | Heteroduplex (seed region) |
| Q316 | R, K | Heteroduplex (seed region) |
| E343 | R, K | Heteroduplex |
| S346 | R, K, Q | Heteroduplex |
| E348 | R, K, Q, H | Heteroduplex |
| Y351 | K, H, N | Heteroduplex |
| V355 | K, R | Heteroduplex |
| H357 | K | Heteroduplex |
| E378 | K, R | Heteroduplex |
| V382 | R | Heteroduplex |
| D386 | R, K | Heteroduplex |
| E395 | K, Q | Heteroduplex |
| N399 | R | Heteroduplex |
| Q424 | R, K | Heteroduplex |
| Q425 | K, R | Heteroduplex |
| D427 | R | Heteroduplex |
| S431 | R, K | Heteroduplex (seed region) |
| V438 | R, K, Q | Heteroduplex (seed region) |
| N441 | R, K | Heteroduplex (seed region) |
| I675 | R, K | Heteroduplex |
| N679 | R, K | Heteroduplex |
| E683 | K | Heteroduplex |
| V685 | K, R, N | Heteroduplex |
| V687 | R, Q, K | Heteroduplex |
| E691 | R, K | Heteroduplex |
| A695 | R, K | Heteroduplex |
| Y712 | R, K | Heteroduplex |
| D716 | R, K | Heteroduplex |
| S775 | R | Heteroduplex |
| S781 | R, K | Heteroduplex |
| D782 | R, N | Heteroduplex |
| E783 | R, K | Heteroduplex |
| Q784 | R | Heteroduplex |
| E797 | R, K | Heteroduplex |
| E800 | N, S, Q | Heteroduplex |
| N841 | R, K | Heteroduplex |
| L855 | K | Heteroduplex (seed region) |
| Q856 | K | Heteroduplex |
| N861 | K, R | Heteroduplex (seed region) |
| Q865 | R, K | Heteroduplex (seed region) |

[0556] In some embodiments, a variant Cas12i2 polypeptide of any one of SEQ ID NOs: 3-146 and 495-512 further comprises one or more substitutions listed in Table 7. In some embodiments, a variant Cas12i2 polypeptide comprises one or more substitutions listed in Table 2 and Table 7.

[0557] In some embodiments, a variant Cas12i2 polypeptide exhibiting increased heteroduplex interactions comprises two or more substitutions, e.g., E691R A695R, S78K V438G, S78K V438A, S346R E343S, D782R D793N, S78R V438G, S78R V438A, S346K E343S, or D782K D793N. In some embodiments, a variant Cas12i2 polypeptide exhibiting increased ternary complex formation/stability comprises two or more substitutions, e.g., E691R A695R, S78K V438G, S78K V438A, S346R E343S, D782R D793N, S78R V438G, S78R V438A, S346K E343S, or D782K D793N. In some embodiments, a variant Cas12i2 polypeptide of any one of SEQ ID NOs: 3-146 and 495-512 further comprises E691R A695R, S78K V438G, S78K V438A, S346R E343S, D782R D793N, S78R V438G, S78R V438A, S346K E343S, or D782K D793N substitutions. In some embodiments, a variant Cas12i2 polypeptide of any one of SEQ ID NOs: 3-146 and 495-512 further comprises E691R A695R, S78K V438G, S78K V438A, S346R E343S, D782R D793N, S78R V438G, S78R V438A, S346K E343S, or D782K D793N substitutions and one or more substitutions listed in Table 4 and/or Table 5 and/or Table 6 and/or Table 7. In some embodiments, the variant Cas12i2 polypeptide comprises any one or more substitutions in Table 4 and/or Table 5 and/or Table 6 and/or Table 7. In some embodiments, the variant Cas12i2 polypeptide with one or more of the substitutions in Table 4 and/or Table 5 and/or Table 6 and/or Table 7 exhibits increased heteroduplex interactions and/or affinity (e.g., by about 4%, 5%, 6%, 7%, 8%, 9%, 10%, 11%, 12%, 13%, 14%, 15%, 16%, 17%, 18%, 19%, 20%, 21%, 22%, 23%, 24%, 25%, 26%, 27%, 28%, 29%, 30%, 31%, 32%, 33%, 34%, 35%, 36%, 37%, 38%, 39%, 40%, 41%, 42%, 43%, 44%, 45%, 46%, 47%, 48%, 49%, 50%, 51%, 52%, 53%, 54%, 55%, 56%, 57%, 58%, 59%, 60%, 61%, 62%, 63%, 64%, 65%, 66%, 67%, 68%, 69%, 70%, 71%, 72%, 73% 74%, 75%, 76%, 77%, 78%, 79%, 80%, 81%, 82%, 83%, 84%, 85%, 86%, 87%, 88%, 89%, 90%, 91%, 92%, 93%, 94%, 95%, 96%, 97%, 98%, 99%, 100%, 110%, 120%, 130%, 140%, 150%, 160%, 170%, 180%, 190%, 200%, or more or any percentage therebetween) as compared to a parent polypeptide. In some embodiments, the variant Cas12i2 polypeptide with one or more of the substitutions in Table 4 and/or Table 5 and/or Table 6 and/or Table 7 exhibits increased ternary complex formation and/or ternary complex stability (e.g., by about 4%, 5%, 6%, 7%, 8%, 9%, 10%, 11%, 12%, 13%, 14%, 15%, 16%, 17%, 18%, 19%, 20%, 21%, 22%, 23%, 24%, 25%, 26%, 27%, 28%, 29%, 30%, 31%, 32%, 33%, 34%, 35%, 36%, 37%, 38%, 39%, 40%, 41%, 42%, 43%, 44%, 45%, 46%, 47%, 48%, 49%, 50%, 51%, 52%, 53%, 54%, 55%, 56%, 57%, 58%, 59%, 60%, 61%, 62%, 63%, 64%, 65%, 66%, 67%, 68%, 69%, 70%, 71%, 72%, 73% 74%, 75%, 76%, 77%, 78%, 79%, 80%, 81%, 82%, 83%, 84%, 85%, 86%, 87%, 88%, 89%, 90%, 91%, 92%, 93%, 94%, 95%, 96%, 97%, 98%, 99%, 100%, 110%, 120%, 130%, 140%, 150%, 160%, 170%, 180%, 190%, 200%, or more or any percentage therebetween) as compared to a parent polypeptide.

[0558] In some embodiments, the variant Cas12i2 polypeptide of any one of SEQ ID NOs: 3-146 and 495-512 comprising one or more substitutions listed in Table 4 and/or Table 5 and/or Table 6 and/or Table 7 exhibits increased enzymatic activity. In some embodiments, the variant Cas12i2 polypeptide comprising one or more substitutions listed in Table 4 and/or Table 5 and/or Table 6 and/or Table 7 exhibits increased enzymatic activity. In some embodiments, the variant Cas12i2 polypeptide of any one of SEQ ID NOs: 3-146 and 495-512 that further comprises E691R A695R, S78K V438G, S78K V438A, S346R E343S, D782R D793N, S78R V438G, S78R V438A, S346K E343S, or D782K D793N substitutions and one or more substitutions listed in Table 4 and/or Table 5 and/or Table 6 and/or Table 7 exhibits increased enzymatic activity. In some embodiments, the variant Cas12i2 polypeptide exhibits increased enzymatic activity (e.g., by about 4%, 5%, 6%, 7%, 8%, 9%, 10%, 11%, 12%, 13%, 14%, 15%, 16%, 17%, 18%, 19%, 20%, 21%, 22%, 23%, 24%, 25%, 26%, 27%, 28%, 29%, 30%, 31%, 32%, 33%, 34%, 35%, 36%, 37%, 38%, 39%, 40%, 41%, 42%, 43%, 44%, 45%, 46%, 47%, 48%, 49%, 50%, 51%, 52%, 53%, 54%, 55%, 56%, 57%, 58%, 59%, 60%, 61%, 62%, 63%, 64%, 65%, 66%, 67%, 68%, 69%, 70%, 71%, 72%, 73% 74%, 75%, 76%, 77%, 78%, 79%, 80%, 81%, 82%, 83%, 84%, 85%, 86%, 87%, 88%, 89%, 90%, 91%, 92%, 93%, 94%, 95%, 96%, 97%, 98%, 99%, 100%, 110%, 120%, 130%, 140%, 150%, 160%, 170%, 180%, 190%, 200%, or more or any percentage therebetween) as compared to a parent polypeptide.

### Increased Double-Stranded DNA Duplex and Heteroduplex Stability

[0559] During ternary complex formation, double-stranded DNA downstream of the PAM sequence melts (e.g., unwinds) into a target strand (TS) and a non-target strand (NTS). The spacer of an RNA guide binds to the TS, forming a double helix that is referred to as the heteroduplex. The PAM sequence does not melt and remains as intact double-stranded DNA. This results in partial exposure of these terminal PAM dsDNA base pair to the environment and protein, which may be energetically unfavorable. Similarly, the terminal base pair of the heteroduplex is exposed and may be energetically unfavorable. See FIG. 21. In some embodiments, an alteration that increases aromatic, hydrophobic, Van der Waals, and/or cation-pi interactions between the variant Cas12i2 polypeptide and the exposed terminal PAM bases of the double-stranded DNA duplex or terminal bases of the heteroduplex increases stability of DNA melting during ternary complex formation. In some embodiments, an alteration that increases aromatic, hydrophobic, Van der Waals, and/or cation-pi interactions between the variant Cas12i2 polypeptide and exposed bases of the double-stranded DNA duplex or heteroduplex increases R-loop stability during ternary complex formation. In some embodiments, an alteration that increases aromatic, hydrophobic, Van der Waals, and/or cation-pi interactions between the variant Cas12i2 polypeptide and exposed bases of the double-stranded DNA duplex or heteroduplex increases ternary complex formation. In some embodiments, an alteration that increases aromatic, hydrophobic, Van der Waals, and/or cation-pi interactions between the variant Cas12i2 polypeptide and exposed bases of the double-stranded DNA duplex or heteroduplex increases ternary complex stability. See FIG. 20D.

[0560] In some embodiments, the alteration that increases aromatic, hydrophobic, Van der Waals, and/or cation-pi interactions is substituting one or more residues with an arginine, lysine, tryptophan, phenylalanine, tyrosine, methionine, histidine, glutamine, threonine, or valine residue. In some embodiments, the alteration that increases aromatic, hydrophobic, Van der Waals, and/or cation-pi interactions is substituting one or more residues contacting the double-stranded DNA duplex and/or heteroduplex with an arginine, lysine, tryptophan, phenylalanine, tyrosine, methionine, histidine, glutamine, threonine, or valine residue. In some embodiments, the alteration that increases aromatic, hydrophobic, Van der Waals, and/or cation-pi interactions is a substitution listed in Table 8. In some embodiments, a variant Cas12i2 polypeptide comprising a substitution listed in Table 8 exhibits increased aromatic, hydrophobic, Van der Waals, and/or cation-pi interactions between the variant Cas12i2 polypeptide and exposed bases of the double-stranded DNA duplex or heteroduplex as compared to a parent polypeptide. In some embodiments, the alteration includes substituting amino acids adjacent to the terminal duplex base pairs with a positively charged, aromatic, hydrophobic, or branched-chain amino acids (e.g., arginine, lysine, tryptophan, phenylalanine, tyrosine, methionine, histidine, glutamine, threonine, isoleucine or valine) to create energetically more favorable conditions for the double-stranded DNA and heteroduplex.

TABLE 8
Substitutions stabilizing the R-loop.

| Residue | Substitution(s) |
|---|---|
| I5 | K, R, W, F, Y |
| Q163 | K, M, R |
| N164 | H, R, K, Q, M, W, F |
| P577 | T, V |
| M869 | Q |

[0561] In some embodiments, a variant Cas12i2 polypeptide of any one of SEQ ID NOs: 3-146 and 495-512 further comprises one or more substitutions listed in Table 8. In some embodiments, a variant Cas12i2 polypeptide comprises one or more substitutions listed in Table 2 and Table 8.

[0562] In some embodiments, a variant Cas12i2 polypeptide exhibiting increased ternary complex formation and/or ternary complex stability (e.g., by stabilizing melting of DNA and/or the R-loop) comprises two or more substitutions, e.g., Q163N N164W, Q163M N164W, Q163M N164Q, Q163N N164Q, I5G P577Y, I5G P577F, I5G P577H, or I5M P577L. In some embodiments, a variant Cas12i2 polypeptide of any one of SEQ ID NOs: 3-146 and 495-512 further comprises Q163N N164W, Q163M N164W, Q163M N164Q, Q163N N164Q, 15G P577Y, 15G P577F, 15G P577H, or I5M P577L substitutions. In some embodiments, the variant Cas12i2 polypeptide comprises any one of SEQ ID NOs: 3-146 and 495-512 further comprises Q163N N164W, Q163M N164W, Q163M N164Q, Q163N N164Q, I5G P577Y, I5G P577F, I5G P577H, or I5M P577L substitutions and one or more substitutions from Table 4, Table 5, Table 6, Table 7, and/or Table 8. In some embodiments, the variant Cas12i2 polypeptide comprises any one or more substitutions in Table 4, Table 5, Table 6, Table 7, and/or Table 8. In some embodiments, the variant Cas12i2 polypeptide with one or more of the substitutions in Table 4, Table 5, Table 6, Table 7, and/or Table 8 exhibits increased ternary complex formation and/or ternary complex stability (e.g., by about 4%, 5%, 6%, 7%, 8%, 9%, 10%, 11%, 12%, 13%, 14%, 15%, 16%, 17%, 18%, 19%, 20%, 21%, 22%, 23%, 24%, 25%, 26%, 27%, 28%, 29%, 30%, 31%, 32%, 33%, 34%, 35%, 36%, 37%, 38%, 39%, 40%, 41%, 42%, 43%, 44%, 45%, 46%, 47%, 48%, 49%, 50%, 51%, 52%, 53%, 54%, 55%, 56%, 57%, 58%, 59%, 60%, 61%, 62%, 63%, 64%, 65%, 66%, 67%, 68%, 69%, 70%, 71%, 72%, 73% 74%, 75%, 76%, 77%, 78%, 79%, 80%, 81%, 82%, 83%, 84%, 85%, 86%, 87%, 88%, 89%, 90%, 91%, 92%, 93%, 94%, 95%, 96%, 97%, 98%, 99%, 100%, 110%, 120%, 130%, 140%, 150%, 160%, 170%, 180%, 190%, 200%, or more or any percentage therebetween) as compared to a parent polypeptide.

[0563] In some embodiments, the variant Cas12i2 polypeptide of any one of SEQ ID NOs: 3-146 and 495-512 comprising one or more substitutions listed in Table 4, Table 5, Table 6, Table 7, and/or Table 8 exhibits increased enzymatic activity. In some embodiments, the variant Cas12i2 polypeptide comprising one or more substitutions listed in Table 4, Table 5, Table 6, Table 7, and/or Table 8 exhibits increased enzymatic activity. In some embodiments, the variant Cas12i2 polypeptide of any one of SEQ ID NOs: 3-146 and 495-512 that further comprises Q163N N164W, Q163M N164W, Q163M N164Q, Q163N N164Q, I5G P577Y, I5G P577F, I5G P577H, or I5M P577L substitutions and one or more substitutions listed in Table 4, Table 5, Table 6, Table 7, and/or Table 8 exhibits increased enzymatic activity. In some embodiments, the variant Cas12i2 polypeptide exhibits increased enzymatic activity (e.g., by about 4%, 5%, 6%, 7%, 8%, 9%, 10%, 11%, 12%, 13%, 14%, 15%, 16%, 17%, 18%, 19%, 20%, 21%, 22%, 23%, 24%, 25%, 26%, 27%, 28%, 29%, 30%, 31%, 32%, 33%, 34%, 35%, 36%, 37%, 38%, 39%, 40%, 41%, 42%, 43%, 44%, 45%, 46%, 47%, 48%, 49%, 50%, 51%, 52%, 53%, 54%, 55%, 56%, 57%, 58%, 59%, 60%, 61%, 62%, 63%, 64%, 65%, 66%, 67%, 68%, 69%, 70%, 71%, 72%, 73% 74%, 75%, 76%, 77%, 78%, 79%, 80%, 81%, 82%, 83%, 84%, 85%, 86%, 87%, 88%, 89%, 90%, 91%, 92%, 93%, 94%, 95%, 96%, 97%, 98%, 99%, 100%, 110%, 120%, 130%, 140%, 150%, 160%, 170%, 180%, 190%, 200%, or more or any percentage therebetween) as compared to a parent polypeptide.

### Increased Conformational Changes

[0564] Conformational changes, e.g., upon binding RNA guide or target DNA, impact the function of a variant Cas12i2 polypeptide, e.g., conformational changes may alter kinetics of the variant Cas12i2 polypeptide. The Rec1 (Helical II) domain of Cas12i2 moves and rotates to accommodate DNA binding during ternary complex formation. See FIG. 22A and FIG. 22B. In some embodiments, an alteration that increases movement (e.g., flexibility or conformational changes) of the Helical II domain increases DNA binding/DNA binding affinity. In some embodiments, a substitution to increase flexibility, e.g., a substitution of a bulky amino acid to an amino acid with a small or smaller side chain (alanine, valine, glycine, or serine residue), in the Helical II domain increases ternary complex formation. In some embodiments, an alteration that increases movement (e.g., flexibility or conformational changes) of the Helical II domain increases ternary complex stability. In some embodiments, the alteration that increases conformational changes of the Helical II domain is substituting one or more residues with an alanine, valine, glycine, or serine residue. In some embodiments, the alteration that increases flexibility of the Helical II domain is substituting one or more residues with an alanine, valine, glycine, or serine residue. In some embodiments, a variant Cas12i2 polypeptide comprises an alteration of one or more amino acids near the Helical II domain. In some embodiments, the variant Cas12i2 polypeptide comprises an alteration of one or more amino acids near the Helical II domain to alanine, valine, glycine, or serine. In some embodiments, the variant Cas12i2 polypeptide comprises a substitution of one or more amino acids 327-330 to any one of alanine, valine, glycine, or serine. In some embodiments, a variant Cas12i2 polypeptide comprises a substitution set forth in Table 9.

TABLE 9
Substitutions altering flexibility of the Helical II domain.

| Residue | Substitution(s) |
|---|---|
| H300 | A |
| L327 | V, A |
| N328 | G, S |
| N329 | G, S |
| L330 | A |
| A434 | G |
| P436 | A, G |

[0565] In some embodiments, a variant Cas12i2 polypeptide of any one of SEQ ID NOs: 3-146 and 495-512 further comprises one or more substitutions listed in Table 9. In some embodiments, a variant Cas12i2 polypeptide comprises one or more substitutions listed in Table 2 and Table 9.

[0566] In some embodiments, the alteration that increases Helical II domain flexibility is a substitution listed in Table 9. In some embodiments, the variant Cas12i2 polypeptide with one or more of the substitutions listed in Table 9 exhibits increased Helical II domain flexibility by about 4%, 5%, 6%, 7%, 8%, 9%, 10%, 11%, 12%, 13%, 14%, 15%, 16%, 17%, 18%, 19%, 20%, 21%, 22%, 23%, 24%, 25%, 26%, 27%, 28%, 29%, 30%, 31%, 32%, 33%, 34%, 35%, 36%, 37%, 38%, 39%, 40%, 41%, 42%, 43%, 44%, 45%, 46%, 47%, 48%, 49%, 50%, 51%, 52%, 53%, 54%, 55%, 56%, 57%, 58%, 59%, 60%, 61%, 62%, 63%, 64%, 65%, 66%, 67%, 68%, 69%, 70%, 71%, 72%, 73% 74%, 75%, 76%, 77%, 78%, 79%, 80%, 81%, 82%, 83%, 84%, 85%, 86%, 87%, 88%, 89%, 90%, 91%, 92%, 93%, 94%, 95%, 96%, 97%, 98%, 99%, 100%, 110%, 120%, 130%, 140%, 150%, 160%, 170%, 180%, 190%, 200%, or more or any percentage therebetween, as compared to a parent polypeptide. In some embodiments, the alteration that increases DNA binding/DNA affinity is a substitution listed in Table 9. In some embodiments, the variant Cas12i2 polypeptide with one or more of the substitutions listed in Table 9 exhibits increased DNA binding/DNA affinity by about 4%, 5%, 6%, 7%, 8%, 9%, 10%, 11%, 12%, 13%, 14%, 15%, 16%, 17%, 18%, 19%, 20%, 21%, 22%, 23%, 24%, 25%, 26%, 27%, 28%, 29%, 30%, 31%, 32%, 33%, 34%, 35%, 36%, 37%, 38%, 39%, 40%, 41%, 42%, 43%, 44%, 45%, 46%, 47%, 48%, 49%, 50%, 51%, 52%, 53%, 54%, 55%, 56%, 57%, 58%, 59%, 60%, 61%, 62%, 63%, 64%, 65%, 66%, 67%, 68%, 69%, 70%, 71%, 72%, 73% 74%, 75%, 76%, 77%, 78%, 79%, 80%, 81%, 82%, 83%, 84%, 85%, 86%, 87%, 88%, 89%, 90%, 91%, 92%, 93%, 94%, 95%, 96%, 97%, 98%, 99%, 100%, 110%, 120%, 130%, 140%, 150%, 160%, 170%, 180%, 190%, 200%, or more or any percentage therebetween, as compared to a parent polypeptide. In some embodiments, a variant Cas12i2 polypeptide comprising a substitution listed in Table 9 exhibits increased ternary complex formation and/or ternary complex stability (e.g., by about 4%, 5%, 6%, 7%, 8%, 9%, 10%, 11%, 12%, 13%, 14%, 15%, 16%, 17%, 18%, 19%, 20%, 21%, 22%, 23%, 24%, 25%, 26%, 27%, 28%, 29%, 30%, 31%, 32%, 33%, 34%, 35%, 36%, 37%, 38%, 39%, 40%, 41%, 42%, 43%, 44%, 45%, 46%, 47%, 48%, 49%, 50%, 51%, 52%, 53%, 54%, 55%, 56%, 57%, 58%, 59%, 60%, 61%, 62%, 63%, 64%, 65%, 66%, 67%, 68%, 69%, 70%, 71%, 72%, 73% 74%, 75%, 76%, 77%, 78%, 79%, 80%, 81%, 82%, 83%, 84%, 85%, 86%, 87%, 88%, 89%, 90%, 91%, 92%, 93%, 94%, 95%, 96%, 97%, 98%, 99%, 100%, 110%, 120%, 130%, 140%, 150%, 160%, 170%, 180%, 190%, 200%, or more or any percentage therebetween) as compared to a parent polypeptide.

[0567] In some embodiments, a variant Cas12i2 polypeptide exhibiting increased Helical II domain flexibility comprises two or more substitutions, e.g., L327V N328S N329G L330A, L327A N328S N329G L330A, L327V N328G N329S L330A, or L327V N328G N329G L330A. In some embodiments, a variant Cas12i2 polypeptide exhibiting increased DNA binding/affinity comprises two or more substitutions, e.g., L327V N328S N329G L330A, L327A N328S N329G L330A, L327V N328G N329S L330A, or L327V N328G N329G L330A. In some embodiments, a variant Cas12i2 polypeptide exhibiting increased ternary complex formation/stability comprises two or more substitutions, e.g., L327V N328S N329G L330A, L327A N328S N329G L330A, L327V N328G N329S L330A, or L327V N328G N329G L330A. In some embodiments, a variant Cas12i2 polypeptide of any one of SEQ ID NOs: 3-146 and 495-512 further comprises L327V N328S N329G L330A, L327A N328S N329G L330A, L327V N328G N329S L330A, or L327V N328G N329G L330A substitutions. In some embodiments, a variant Cas12i2 polypeptide of any one of SEQ ID NOs: 3-146 and 495-512 further comprises L327V N328S N329G L330A, L327A N328S N329G L330A, L327V N328G N329S L330A, or L327V N328G N329G L330A substitutions and one or more substitutions listed in Table 4 and/or Table 5 and/or Table 6 and/or Table 7 and/or Table 8 and/or Table 9. In some embodiments, the variant Cas12i2 polypeptide comprises any one or more substitutions in Table 4 and/or Table 5 and/or Table 6 and/or Table 7 and/or Table 8 and/or Table 9. In some embodiments, the variant Cas12i2 polypeptide with one or more of the substitutions in Table 4 and/or Table 5 and/or Table 6 and/or Table 7 and/or Table 8 and/or Table 9 exhibits increased DNA binding/affinity (e.g., by about 4%, 5%, 6%, 7%, 8%, 9%, 10%, 11%, 12%, 13%, 14%, 15%, 16%, 17%, 18%, 19%, 20%, 21%, 22%, 23%, 24%, 25%, 26%, 27%, 28%, 29%, 30%, 31%, 32%, 33%, 34%, 35%, 36%, 37%, 38%, 39%, 40%, 41%, 42%, 43%, 44%, 45%, 46%, 47%, 48%, 49%, 50%, 51%, 52%, 53%, 54%, 55%, 56%, 57%, 58%, 59%, 60%, 61%, 62%, 63%, 64%, 65%, 66%, 67%, 68%, 69%, 70%, 71%, 72%, 73% 74%, 75%, 76%, 77%, 78%, 79%, 80%, 81%, 82%, 83%, 84%, 85%, 86%, 87%, 88%, 89%, 90%, 91%, 92%, 93%, 94%, 95%, 96%, 97%, 98%, 99%, 100%, 110%, 120%, 130%, 140%, 150%, 160%, 170%, 180%, 190%, 200%, or more or any percentage therebetween) as compared to a parent polypeptide. In some embodiments, the variant Cas12i2 polypeptide with one or more of the substitutions in Table 4 and/or Table 5 and/or Table 6 and/or Table 7 and/or Table 8 and/or Table 9 exhibits increased ternary complex formation and/or ternary complex stability (e.g., by about 4%, 5%, 6%, 7%, 8%, 9%, 10%, 11%, 12%, 13%, 14%, 15%, 16%, 17%, 18%, 19%, 20%, 21%, 22%, 23%, 24%, 25%, 26%, 27%, 28%, 29%, 30%, 31%, 32%, 33%, 34%, 35%, 36%, 37%, 38%, 39%, 40%, 41%, 42%, 43%, 44%, 45%, 46%, 47%, 48%, 49%, 50%, 51%, 52%, 53%, 54%, 55%, 56%, 57%, 58%, 59%, 60%, 61%, 62%, 63%, 64%, 65%, 66%, 67%, 68%, 69%, 70%, 71%, 72%, 73% 74%, 75%, 76%, 77%, 78%, 79%, 80%, 81%, 82%, 83%, 84%, 85%, 86%, 87%, 88%, 89%, 90%, 91%, 92%, 93%, 94%, 95%, 96%, 97%, 98%, 99%, 100%, 110%, 120%, 130%, 140%, 150%, 160%, 170%, 180%, 190%, 200%, or more or any percentage therebetween) as compared to a parent polypeptide.

[0568] In some embodiments, the variant Cas12i2 polypeptide of any one of SEQ ID NOs: 3-146 and 495-512 comprising one or more substitutions listed in Table 4 and/or Table 5 and/or Table 6 and/or Table 7 and/or Table 8 and/or Table 9 exhibits increased enzymatic activity. In some embodiments, the variant Cas12i2 polypeptide comprising one or more substitutions listed in Table 4 and/or Table 5 and/or Table 6 and/or Table 7 and/or Table 8 and/or Table 9 exhibits increased enzymatic activity. In some embodiments, the variant Cas12i2 polypeptide of any one of SEQ ID NOs: 3-146 and 495-512 that further comprises L327V N328S N329G L330A, L327A N328S N329G L330A, L327V N328G N329S L330A, or L327V N328G N329G L330A substitutions and one or more substitutions listed in Table 4 and/or Table 5 and/or Table 6 and/or Table 7 and/or Table 8 and/or Table 9 exhibits increased enzymatic activity. In some embodiments, the variant Cas12i2 polypeptide exhibits increased enzymatic activity (e.g., by about 4%, 5%, 6%, 7%, 8%, 9%, 10%, 11%, 12%, 13%, 14%, 15%, 16%, 17%, 18%, 19%, 20%, 21%, 22%, 23%, 24%, 25%, 26%, 27%, 28%, 29%, 30%, 31%, 32%, 33%, 34%, 35%, 36%, 37%, 38%, 39%, 40%, 41%, 42%, 43%, 44%, 45%, 46%, 47%, 48%, 49%, 50%, 51%, 52%, 53%, 54%, 55%, 56%, 57%, 58%, 59%, 60%, 61%, 62%, 63%, 64%, 65%, 66%, 67%, 68%, 69%, 70%, 71%, 72%, 73% 74%, 75%, 76%, 77%, 78%, 79%, 80%, 81%, 82%, 83%, 84%, 85%, 86%, 87%, 88%, 89%, 90%, 91%, 92%, 93%, 94%, 95%, 96%, 97%, 98%, 99%, 100%, 110%, 120%, 130%, 140%, 150%, 160%, 170%, 180%, 190%, 200%, or more or any percentage therebetween) as compared to a parent polypeptide.

[0569] In some embodiments, an alteration that increases connections between the Nuc and Helical II interface, which forms when target single-stranded DNA is in the active site of a Cas12i2 polypeptide, increases the transition from binary complex to ternary complex. In some embodiments, an alteration that increases connections between the Nuc and Helical II interface increases ternary complex formation. See FIG. 22B. In some embodiments, an alteration that increases connections between the Nuc and Helical II interface increases ternary complex stability. In some embodiments, the alteration that increases connections between the Nuc and Helical II interface is substituting one or more residues with an aspartic acid, glutamic acid, arginine, or lysine residue. In some embodiments, the variant Cas12i2 polypeptide comprises a substitution of one or more amino acids 380-390 or 910-930 to any one of aspartic acid, glutamic acid, arginine, or lysine. In some embodiments, a variant Cas12i2 polypeptide comprises a substitution set forth in Table 10.

TABLE 10
Substitutions increasing connections
at the Nuc and Helical II interface.

| Residue | Substitution(s) |
|---|---|
| V383 | D, E |
| D386 | E |
| D387 | E |
| Q919 | K |
| N925 | D, E, R, K |

[0570] In some embodiments, a variant Cas12i2 polypeptide of any one of SEQ ID NOs: 3-146 and 495-512 further comprises one or more substitutions listed in Table 10. In some embodiments, a variant Cas12i2 polypeptide comprises one or more substitutions listed in Table 2 and Table 10.

[0571] In some embodiments, a substitution in Table 10 increases connections between the Nuc and Helical II interface. In some embodiments, the variant Cas12i2 polypeptide with one or more of the substitutions in Table 10 increases connections between the Nuc and Helical II interface by about 4%, 5%, 6%, 7%, 8%, 9%, 10%, 11%, 12%, 13%, 14%, 15%, 16%, 17%, 18%, 19%, 20%, 21%, 22%, 23%, 24%, 25%, 26%, 27%, 28%, 29%, 30%, 31%, 32%, 33%, 34%, 35%, 36%, 37%, 38%, 39%, 40%, 41%, 42%, 43%, 44%, 45%, 46%, 47%, 48%, 49%, 50%, 51%, 52%, 53%, 54%, 55%, 56%, 57%, 58%, 59%, 60%, 61%, 62%, 63%, 64%, 65%, 66%, 67%, 68%, 69%, 70%, 71%, 72%, 73% 74%, 75%, 76%, 77%, 78%, 79%, 80%, 81%, 82%, 83%, 84%, 85%, 86%, 87%, 88%, 89%, 90%, 91%, 92%, 93%, 94%, 95%, 96%, 97%, 98%, 99%, 100%, 110%, 120%, 130%, 140%, 150%, 160%, 170%, 180%, 190%, 200%, or more or any percentage therebetween, as compared to a parent polypeptide. In some embodiments, a variant Cas12i2 polypeptide comprising a substitution listed in Table 10 exhibits increased ternary complex formation and/or ternary complex stability (e.g., by about 4%, 5%, 6%, 7%, 8%, 9%, 10%, 11%, 12%, 13%, 14%, 15%, 16%, 17%, 18%, 19%, 20%, 21%, 22%, 23%, 24%, 25%, 26%, 27%, 28%, 29%, 30%, 31%, 32%, 33%, 34%, 35%, 36%, 37%, 38%, 39%, 40%, 41%, 42%, 43%, 44%, 45%, 46%, 47%, 48%, 49%, 50%, 51%, 52%, 53%, 54%, 55%, 56%, 57%, 58%, 59%, 60%, 61%, 62%, 63%, 64%, 65%, 66%, 67%, 68%, 69%, 70%, 71%, 72%, 73% 74%, 75%, 76%, 77%, 78%, 79%, 80%, 81%, 82%, 83%, 84%, 85%, 86%, 87%, 88%, 89%, 90%, 91%, 92%, 93%, 94%, 95%, 96%, 97%, 98%, 99%, 100%, 110%, 120%, 130%, 140%, 150%, 160%, 170%, 180%, 190%, 200%, or more or any percentage therebetween) as compared to a parent polypeptide.

[0572] In some embodiments, a variant Cas12i2 polypeptide exhibiting increased connections between the Nuc and Helical II interface comprises two or more substitutions, e.g., V383D D387E, V383D D386E, V383E D387E, V383E D386E, Q919K D387E, Q919K D383D, Q919K V383E, D386E D387E, N925D D362R K365R, N925E D362R K365R, N925D D362K K365R, N925E D362K K365R, N925D D362R, N925E D362R, N925D D362K, N925E D362K, N925D K365R, N925E K365R, or D362E N925K. In some embodiments, a variant Cas12i2 polypeptide exhibiting increased ternary complex formation/stability comprises two or more substitutions, e.g., V383D D387E, V383D D386E, V383E D387E, V383E D386E, Q919K D387E, Q919K D383D, Q919K V383E, D386E D387E, N925D D362R K365R, N925E D362R K365R, N925D D362K K365R, N925E D362K K365R, N925D D362R, N925E D362R, N925D D362K, N925E D362K, N925D K365R, N925E K365R, or D362E N925K. In some embodiments, a variant Cas12i2 polypeptide of any one of SEQ ID NOs: 3-146 and 495-512 further comprises V383D D387E, V383D D386E, V383E D387E, V383E D386E, Q919K D387E, Q919K D383D, Q919K V383E, D386E D387E, N925D D362R K365R, N925E D362R K365R, N925D D362K K365R, N925E D362K K365R, N925D D362R, N925E D362R, N925D D362K, N925E D362K, N925D K365R, N925E K365R, or D362E N925K substitutions. In some embodiments, a variant Cas12i2 polypeptide of any one of SEQ ID NOs: 3-146 and 495-512 further comprises V383D D387E, V383D D386E, V383E D387E, V383E D386E, Q919K D387E, Q919K D383D, Q919K V383E, D386E D387E, N925D D362R K365R, N925E D362R K365R, N925D D362K K365R, N925E D362K K365R, N925D D362R, N925E D362R, N925D D362K, N925E D362K, N925D K365R, N925E K365R, or D362E N925K substitutions and one or more substitutions listed in Table 4 and/or Table 5 and/or Table 6 and/or Table 7 and/or Table 8 and/or Table 9 and/or Table 10. In some embodiments, the variant Cas12i2 polypeptide comprises any one or more substitutions in Table 4 and/or Table 5 and/or Table 6 and/or Table 7 and/or Table 8 and/or Table 9 and/or Table 10. In some embodiments, the variant Cas12i2 polypeptide with one or more of the substitutions in Table 4 and/or Table 5 and/or Table 6 and/or Table 7 and/or Table 8 and/or Table 9 and/or Table 10 exhibits increased connections between the Nuc and Helical II interface (e.g., by about 4%, 5%, 6%, 7%, 8%, 9%, 10%, 11%, 12%, 13%, 14%, 15%, 16%, 17%, 18%, 19%, 20%, 21%, 22%, 23%, 24%, 25%, 26%, 27%, 28%, 29%, 30%, 31%, 32%, 33%, 34%, 35%, 36%, 37%, 38%, 39%, 40%, 41%, 42%, 43%, 44%, 45%, 46%, 47%, 48%, 49%, 50%, 51%, 52%, 53%, 54%, 55%, 56%, 57%, 58%, 59%, 60%, 61%, 62%, 63%, 64%, 65%, 66%, 67%, 68%, 69%, 70%, 71%, 72%, 73% 74%, 75%, 76%, 77%, 78%, 79%, 80%, 81%, 82%, 83%, 84%, 85%, 86%, 87%, 88%, 89%, 90%, 91%, 92%, 93%, 94%, 95%, 96%, 97%, 98%, 99%, 100%, 110%, 120%, 130%, 140%, 150%, 160%, 170%, 180%, 190%, 200%, or more or any percentage therebetween) as compared to a parent polypeptide. In some embodiments, the variant Cas12i2 polypeptide with one or more of the substitutions in Table 4 and/or Table 5 and/or Table 6 and/or Table 7 and/or Table 8 and/or Table 9 and/or Table 10 exhibits increased ternary complex formation and/or ternary complex stability (e.g., by about 4%, 5%, 6%, 7%, 8%, 9%, 10%, 11%, 12%, 13%, 14%, 15%, 16%, 17%, 18%, 19%, 20%, 21%, 22%, 23%, 24%, 25%, 26%, 27%, 28%, 29%, 30%, 31%, 32%, 33%, 34%, 35%, 36%, 37%, 38%, 39%, 40%, 41%, 42%, 43%, 44%, 45%, 46%, 47%, 48%, 49%, 50%, 51%, 52%, 53%, 54%, 55%, 56%, 57%, 58%, 59%, 60%, 61%, 62%, 63%, 64%, 65%, 66%, 67%, 68%, 69%, 70%, 71%, 72%, 73% 74%, 75%, 76%, 77%, 78%, 79%, 80%, 81%, 82%, 83%, 84%, 85%, 86%, 87%, 88%, 89%, 90%, 91%, 92%, 93%, 94%, 95%, 96%, 97%, 98%, 99%, 100%, 110%, 120%, 130%, 140%, 150%, 160%, 170%, 180%, 190%, 200%, or more or any percentage therebetween) as compared to a parent polypeptide.

[0573] In some embodiments, the variant Cas12i2 polypeptide of any one of SEQ ID NOs: 3-146 and 495-512 comprising one or more substitutions listed in Table 4 and/or Table 5 and/or Table 6 and/or Table 7 and/or Table 8 and/or Table 9 and/or Table 10 exhibits increased enzymatic activity. In some embodiments, the variant Cas12i2 polypeptide comprising one or more substitutions listed in Table 4 and/or Table 5 and/or Table 6 and/or Table 7 and/or Table 8 and/or Table 9 and/or Table 10 exhibits increased enzymatic activity. In some embodiments, the variant Cas12i2 polypeptide of any one of SEQ ID NOs: 3-146 and 495-512 that further comprises V383D D387E, V383D D386E, V383E D387E, V383E D386E, Q919K D387E, Q919K D383D, Q919K V383E, D386E D387E, N925D D362R K365R, N925E D362R K365R, N925D D362K K365R, N925E D362K K365R, N925D D362R, N925E D362R, N925D D362K, N925E D362K, N925D K365R, N925E K365R, or D362E N925K substitutions and one or more substitutions listed in Table 4 and/or Table 5 and/or Table 6 and/or Table 7 and/or Table 8 and/or Table 9 and/or Table 10 exhibits increased enzymatic activity. In some embodiments, the variant Cas12i2 polypeptide exhibits increased enzymatic activity (e.g., by about 4%, 5%, 6%, 7%, 8%, 9%, 10%, 11%, 12%, 13%, 14%, 15%, 16%, 17%, 18%, 19%, 20%, 21%, 22%, 23%, 24%, 25%, 26%, 27%, 28%, 29%, 30%, 31%, 32%, 33%, 34%, 35%, 36%, 37%, 38%, 39%, 40%, 41%, 42%, 43%, 44%, 45%, 46%, 47%, 48%, 49%, 50%, 51%, 52%, 53%, 54%, 55%, 56%, 57%, 58%, 59%, 60%, 61%, 62%, 63%, 64%, 65%, 66%, 67%, 68%, 69%, 70%, 71%, 72%, 73% 74%, 75%, 76%, 77%, 78%, 79%, 80%, 81%, 82%, 83%, 84%, 85%, 86%, 87%, 88%, 89%, 90%, 91%, 92%, 93%, 94%, 95%, 96%, 97%, 98%, 99%, 100%, 110%, 120%, 130%, 140%, 150%, 160%, 170%, 180%, 190%, 200%, or more or any percentage therebetween) as compared to a parent polypeptide.

[0574] In some embodiments, an alteration decreases connections between the Nuc and Helical II interface. In some embodiments, an alteration that decreases connections between the Nuc and Helical II interface increases ternary complex formation. In some embodiments, an alteration that decreases connections between the Nuc and Helical II interface is substituting one or more residues with an asparagine or serine residue. In some embodiments, the variant Cas12i2 polypeptide comprises a substitution of one or more amino acids 386, 387, 915, and 956 to asparagine or serine. In some embodiments, the variant Cas12i2 polypeptide comprises D386N R915S, D387N R956S, D386N D387N R915S R956S, or D386N D387N R915S R922S R956S substitutions. In some embodiments, the variant Cas12i2 polypeptide comprises of any one of SEQ ID NOs: 3-146 and 495-512 further comprises D386N R915S, D387N R956S, D386N D387N R915S R956S, or D386N D387N R915S R922S R956S substitutions.

### Increased Fidelity

[0575] In some aspects, a variant Cas12i2 polypeptide comprises an alteration that increases on-target specificity relative to a parent polypeptide. In some aspects, a variant Cas12i2 polypeptide comprises an alteration that increases on-target binding relative to a parent polypeptide. In some embodiments, the variant Cas12i2 polypeptide comprises an alteration that increases interactions (e.g., affinity) between the variant Cas12i2 polypeptide and on-target DNA relative to a parent polypeptide.

[0576] In some embodiments, the alteration that increases on-target specificity is substituting one or more amino acids to an alanine, serine, valine, glutamine, or asparagine residue. In some aspects, the alteration that increases on-target specificity is truncating a residue that contacts the spacer sequence of an RNA guide (e.g., substituting a residue that contacts the spacer sequence with a residue having a smaller side chain). In some aspects, the alteration that increases on-target specificity is truncating a residue, e.g., substitution to alanine, serine, or valine, that contacts the spacer sequence of an RNA guide. In some embodiments, the variant Cas12i2 polypeptide comprises a substitution of one or more amino acids that contact the spacer sequence of an RNA guide to an alanine, serine, valine, glutamine, or asparagine residue. In some embodiments, the variant Cas12i2 polypeptide comprises a substitution of one or more amino acids 290-320, 340-360, 390-450, 550-580, 710-720, 760-810, or 830-870 to any one of an alanine, serine, valine, glutamine, or asparagine residue. In some embodiments, the variant Cas12i2 polypeptide comprises an alteration of one or more amino acids in at least one domain/motif (e.g., the Wedge domain, Rec1 domain, Rec2 domain, or RuvC2 motif) to an alanine, serine, valine, glutamine, or asparagine residue. In some embodiments, a truncating substitution in the Helical II domain results in a variant Cas12i2 polypeptide exhibiting increased on-target binding specificity. In some aspects, one or more of the following Helical II residues are truncated: E348, E349, E395, 1397, R398, N399, Y351, H356, H357, K394, and R428. In some embodiments, the substitution(s) increase on-target specificity with the variant Cas12i2 polypeptide by about 4%, 5%, 6%, 7%, 8%, 9%, 10%, 11%, 12%, 13%, 14%, 15%, 16%, 17%, 18%, 19%, 20%, 21%, 22%, 23%, 24%, 25%, 26%, 27%, 28%, 29%, 30%, 31%, 32%, 33%, 34%, 35%, 36%, 37%, 38%, 39%, 40%, 41%, 42%, 43%, 44%, 45%, 46%, 47%, 48%, 49%, 50%, 51%, 52%, 53%, 54%, 55%, 56%, 57%, 58%, 59%, 60%, 61%, 62%, 63%, 64%, 65%, 66%, 67%, 68%, 69%, 70%, 71%, 72%, 73% 74%, 75%, 76%, 77%, 78%, 79%, 80%, 81%, 82%, 83%, 84%, 85%, 86%, 87%, 88%, 89%, 90%, 91%, 92%, 93%, 94%, 95%, 96%, 97%, 98%, 99%, 100%, 110%, 120%, 130%, 140%, 150%, 160%, 170%, 180%, 190%, 200%, or more or any percentage therebetween, as compared to a parent polypeptide. In some embodiments, the substitution(s) increase on-target binding of the variant Cas12i2 polypeptide by about 4%, 5%, 6%, 7%, 8%, 9%, 10%, 11%, 12%, 13%, 14%, 15%, 16%, 17%, 18%, 19%, 20%, 21%, 22%, 23%, 24%, 25%, 26%, 27%, 28%, 29%, 30%, 31%, 32%, 33%, 34%, 35%, 36%, 37%, 38%, 39%, 40%, 41%, 42%, 43%, 44%, 45%, 46%, 47%, 48%, 49%, 50%, 51%, 52%, 53%, 54%, 55%, 56%, 57%, 58%, 59%, 60%, 61%, 62%, 63%, 64%, 65%, 66%, 67%, 68%, 69%, 70%, 71%, 72%, 73% 74%, 75%, 76%, 77%, 78%, 79%, 80%, 81%, 82%, 83%, 84%, 85%, 86%, 87%, 88%, 89%, 90%, 91%, 92%, 93%, 94%, 95%, 96%, 97%, 98%, 99%, 100%, 110%, 120%, 130%, 140%, 150%, 160%, 170%, 180%, 190%, 200%, or more or any percentage therebetween, as compared to a parent polypeptide. In some embodiments, the substitution(s) increase on-target binding affinity of the variant Cas12i2 polypeptide by about 4%, 5%, 6%, 7%, 8%, 9%, 10%, 11%, 12%, 13%, 14%, 15%, 16%, 17%, 18%, 19%, 20%, 21%, 22%, 23%, 24%, 25%, 26%, 27%, 28%, 29%, 30%, 31%, 32%, 33%, 34%, 35%, 36%, 37%, 38%, 39%, 40%, 41%, 42%, 43%, 44%, 45%, 46%, 47%, 48%, 49%, 50%, 51%, 52%, 53%, 54%, 55%, 56%, 57%, 58%, 59%, 60%, 61%, 62%, 63%, 64%, 65%, 66%, 67%, 68%, 69%, 70%, 71%, 72%, 73% 74%, 75%, 76%, 77%, 78%, 79%, 80%, 81%, 82%, 83%, 84%, 85%, 86%, 87%, 88%, 89%, 90%, 91%, 92%, 93%, 94%, 95%, 96%, 97%, 98%, 99%, 100%, 110%, 120%, 130%, 140%, 150%, 160%, 170%, 180%, 190%, 200%, or more or any percentage therebetween, as compared to a parent polypeptide.

[0577] Non-limiting examples of alterations that can alter the ability of a variant Cas12i2 polypeptide to selectively bind to on-target DNA are substitutions listed in Table 11. In some embodiments, a variant Cas12i2 polypeptide comprising one or more substitutions listed in Table 11 exhibits increased on-target specificity relative to a parent polypeptide. In some embodiments, a variant Cas12i2 polypeptide comprising one or more substitutions listed in Table 11 exhibits increased on-target binding relative to a parent polypeptide. In some embodiments, a variant Cas12i2 polypeptide comprising one or more substitutions listed in Table 11 exhibits increased on-target binding affinity relative to a parent polypeptide. As used herein, the term “TS seed” refers to the seed sequence that forms a duplex with the RNA guide and the term “guide seed” refers to the RNA guide that pairs with the TS seed sequence.

TABLE 11
Substitutions increasing on-target specificity.

| Residue | Substitution(s) | Contact |
|---|---|---|
| K9 | A, N | Heteroduplex guide seed |
| Y119 | A | Heteroduplex guide seed |
| N296 | A | Heteroduplex TS seed |
| T301 | A | Heteroduplex TS seed |
| K304 | A | Heteroduplex TS seed |
| I305 | A | Heteroduplex TS/guide seed |
| K306 | A | Heteroduplex guide seed |
| T308 | A | Heteroduplex TS seed |
| R309 | Q, A | Heteroduplex TS seed |
| N312 | A | Heteroduplex TS seed |
| S346 | A | Heteroduplex guide |
| E348 | A, S | Heteroduplex guide |
| E349 | A, S | Heteroduplex TS |
| Y351 | A, S, H | Heteroduplex TS |
| H356 | A, S | Heteroduplex TS |
| H357 | A, S | Heteroduplex TS |
| K394 | A | Heteroduplex TS |
| E395 | A, S | Heteroduplex TS |
| I397 | V, A | Heteroduplex TS |
| R398 | A, S | Heteroduplex guide |
| N399 | A, S | Heteroduplex guide |
| R402 | A, S | Heteroduplex guide |
| R428 | A, Q | Heteroduplex guide |
| K433 | A, S | Heteroduplex guide seed |
| N435 | A | Heteroduplex guide seed |
| N441 | A | Heteroduplex guide seed |
| Q442 | A | Heteroduplex guide seed |
| T445 | A | Heteroduplex TS seed |
| S565 | A | Heteroduplex TS seed |
| T567 | A | Heteroduplex TS seed |
| R575 | A, Q | Heteroduplex guide seed |
| K678 | A, N | Heteroduplex TS |
| R715 | A, Q | Heteroduplex guide |
| R719 | A, Q | Heteroduplex guide |
| K761 | A, N | Heteroduplex TS |
| Y765 | A | Heteroduplex TS/guide |
| S766 | A | Heteroduplex guide |
| S769 | A | Heteroduplex guide |
| A774 | G | Heteroduplex guide |
| K776 | A | Heteroduplex TS/guide |
| P779 | A | Heteroduplex TS |
| D782 | A | Heteroduplex TS |
| R785 | A, Q | Heteroduplex TS |
| E800 | A | Heteroduplex TS |
| T804 | A | Heteroduplex TS |
| K807 | A | Heteroduplex TS |
| T838 | A | Heteroduplex TS |
| T839 | A | Heteroduplex guide |
| N841 | A | Heteroduplex guide |
| K844 | A, N | Heteroduplex TS |
| K845 | A, N | Heteroduplex TS/guide |
| N848 | A | Heteroduplex guide |
| S849 | G | Heteroduplex guide |
| M852 | A, S | Heteroduplex TS/guide |
| L855 | A | Heteroduplex TS |
| R857 | A, N | Heteroduplex TS |
| N861 | A | Heteroduplex TS |
| K862 | A, N | Heteroduplex guide |
| Q865 | A | Heteroduplex guide seed |
| M866 | A | Heteroduplex guide seed |

[0578] In some embodiments, the alteration that increases on-target specificity (e.g., a substitution listed in Table 11) further increases on-target ternary complex formation and/or on-target ternary complex stability (e.g., on-target ternary complex formation/stability). In some embodiments, the alteration that increases on-target specificity increases on-ternary complex formation and/or on-target ternary complex stability by about 4%, 5%, 6%, 7%, 8%, 9%, 10%, 11%, 12%, 13%, 14%, 15%, 16%, 17%, 18%, 19%, 20%, 21%, 22%, 23%, 24%, 25%, 26%, 27%, 28%, 29%, 30%, 31%, 32%, 33%, 34%, 35%, 36%, 37%, 38%, 39%, 40%, 41%, 42%, 43%, 44%, 45%, 46%, 47%, 48%, 49%, 50%, 51%, 52%, 53%, 54%, 55%, 56%, 57%, 58%, 59%, 60%, 61%, 62%, 63%, 64%, 65%, 66%, 67%, 68%, 69%, 70%, 71%, 72%, 73% 74%, 75%, 76%, 77%, 78%, 79%, 80%, 81%, 82%, 83%, 84%, 85%, 86%, 87%, 88%, 89%, 90%, 91%, 92%, 93%, 94%, 95%, 96%, 97%, 98%, 99%, 100%, 110%, 120%, 130%, 140%, 150%, 160%, 170%, 180%, 190%, 200%, or more or any percentage therebetween as compared to a parent polypeptide.

[0579] In some aspects, a variant Cas12i2 polypeptide comprises an alteration that decreases off-target specificity relative to a parent polypeptide. In some aspects, a variant Cas12i2 polypeptide comprises an alteration that decreases off-target binding relative to a parent polypeptide. In some embodiments, the variant Cas12i2 polypeptide comprises an alteration that decreases interactions (e.g., affinity) between the variant Cas12i2 polypeptide and off-target DNA relative to a parent polypeptide.

[0580] In some embodiments, the alteration that decreases off-target specificity is substituting one or more amino acids to an alanine, serine, valine, glutamine, or asparagine residue. In some aspects, the alteration that decreases off-target specificity is truncating a residue that contacts the spacer sequence of an RNA guide (e.g., substituting a residue that contacts the spacer sequence with a residue having a smaller side chain). In some aspects, the alteration that decreases off-target specificity is truncating a residue, e.g., substitution to alanine, serine, or valine, that contact the spacer sequence of an RNA guide. In some embodiments, the variant Cas12i2 polypeptide comprises a substitution of one or more amino acids that contact the spacer sequence of an RNA guide to an alanine, serine, valine, glutamine, or asparagine residue. In some embodiments, the variant Cas12i2 polypeptide comprises a substitution of one or more amino acids 290-320, 340-360, 390-450, 550-580, 710-720, 760-810, or 830-870 to any one of an alanine, serine, valine, glutamine, or asparagine residue. In some embodiments, the variant Cas12i2 polypeptide comprises an alteration of one or more amino acids in at least one domain/motif (e.g., the Wedge domain, Rec1 domain, Rec2 domain, or RuvC2 motif) to an alanine, serine, valine, glutamine, or asparagine residue. In some embodiments, a truncating substitution in the Helical II domain results in a variant Cas12i2 polypeptide exhibiting decreased off-target binding specificity. In some aspects, one or more of the following Helical II residues are truncated: E348, E349, E395, 1397, R398, N399, Y351, H356, H357, K394, and R428. In some embodiments, the substitution(s) decrease off-target specificity with the variant Cas12i2 polypeptide by about 4%, 5%, 6%, 7%, 8%, 9%, 10%, 11%, 12%, 13%, 14%, 15%, 16%, 17%, 18%, 19%, 20%, 21%, 22%, 23%, 24%, 25%, 26%, 27%, 28%, 29%, 30%, 31%, 32%, 33%, 34%, 35%, 36%, 37%, 38%, 39%, 40%, 41%, 42%, 43%, 44%, 45%, 46%, 47%, 48%, 49%, 50%, 51%, 52%, 53%, 54%, 55%, 56%, 57%, 58%, 59%, 60%, 61%, 62%, 63%, 64%, 65%, 66%, 67%, 68%, 69%, 70%, 71%, 72%, 73% 74%, 75%, 76%, 77%, 78%, 79%, 80%, 81%, 82%, 83%, 84%, 85%, 86%, 87%, 88%, 89%, 90%, 91%, 92%, 93%, 94%, 95%, 96%, 97%, 98%, 99%, or 100%, as compared to a parent polypeptide. In some embodiments, the substitution(s) decrease off-target binding of the variant Cas12i2 polypeptide by about 4%, 5%, 6%, 7%, 8%, 9%, 10%, 11%, 12%, 13%, 14%, 15%, 16%, 17%, 18%, 19%, 20%, 21%, 22%, 23%, 24%, 25%, 26%, 27%, 28%, 29%, 30%, 31%, 32%, 33%, 34%, 35%, 36%, 37%, 38%, 39%, 40%, 41%, 42%, 43%, 44%, 45%, 46%, 47%, 48%, 49%, 50%, 51%, 52%, 53%, 54%, 55%, 56%, 57%, 58%, 59%, 60%, 61%, 62%, 63%, 64%, 65%, 66%, 67%, 68%, 69%, 70%, 71%, 72%, 73% 74%, 75%, 76%, 77%, 78%, 79%, 80%, 81%, 82%, 83%, 84%, 85%, 86%, 87%, 88%, 89%, 90%, 91%, 92%, 93%, 94%, 95%, 96%, 97%, 98%, 99%, or 100%, as compared to a parent polypeptide. In some embodiments, the substitution(s) decrease off-target binding affinity of the variant Cas12i2 polypeptide by about 4%, 5%, 6%, 7%, 8%, 9%, 10%, 11%, 12%, 13%, 14%, 15%, 16%, 17%, 18%, 19%, 20%, 21%, 22%, 23%, 24%, 25%, 26%, 27%, 28%, 29%, 30%, 31%, 32%, 33%, 34%, 35%, 36%, 37%, 38%, 39%, 40%, 41%, 42%, 43%, 44%, 45%, 46%, 47%, 48%, 49%, 50%, 51%, 52%, 53%, 54%, 55%, 56%, 57%, 58%, 59%, 60%, 61%, 62%, 63%, 64%, 65%, 66%, 67%, 68%, 69%, 70%, 71%, 72%, 73% 74%, 75%, 76%, 77%, 78%, 79%, 80%, 81%, 82%, 83%, 84%, 85%, 86%, 87%, 88%, 89%, 90%, 91%, 92%, 93%, 94%, 95%, 96%, 97%, 98%, 99%, or 100%, as compared to a parent polypeptide.

[0581] Non-limiting examples of alterations that can alter the ability of a variant Cas12i2 polypeptide to bind to off-target DNA are substitutions listed in Table 11. In some embodiments, a variant Cas12i2 polypeptide comprising one or more substitutions listed in Table 11 exhibits decreased off-target specificity relative to a parent polypeptide. In some embodiments, a variant Cas12i2 polypeptide comprising one or more substitutions listed in Table 11 exhibits decreased off-target binding relative to a parent polypeptide. In some embodiments, a variant Cas12i2 polypeptide comprising one or more substitutions listed in Table 11 exhibits decreased off-target binding affinity relative to a parent polypeptide.

[0582] In some embodiments, the substitution(s) that increase on-target specificity of the variant Cas12i2 polypeptide by about 4%, 5%, 6%, 7%, 8%, 9%, 10%, 11%, 12%, 13%, 14%, 15%, 16%, 17%, 18%, 19%, 20%, 21%, 22%, 23%, 24%, 25%, 26%, 27%, 28%, 29%, 30%, 31%, 32%, 33%, 34%, 35%, 36%, 37%, 38%, 39%, 40%, 41%, 42%, 43%, 44%, 45%, 46%, 47%, 48%, 49%, 50%, 51%, 52%, 53%, 54%, 55%, 56%, 57%, 58%, 59%, 60%, 61%, 62%, 63%, 64%, 65%, 66%, 67%, 68%, 69%, 70%, 71%, 72%, 73% 74%, 75%, 76%, 77%, 78%, 79%, 80%, 81%, 82%, 83%, 84%, 85%, 86%, 87%, 88%, 89%, 90%, 91%, 92%, 93%, 94%, 95%, 96%, 97%, 98%, 99%, 100%, 110%, 120%, 130%, 140%, 150%, 160%, 170%, 180%, 190%, 200%, or more or any percentage therebetween further decrease off-target specificity of the variant Cas12i2 polypeptide by about 4%, 5%, 6%, 7%, 8%, 9%, 10%, 11%, 12%, 13%, 14%, 15%, 16%, 17%, 18%, 19%, 20%, 21%, 22%, 23%, 24%, 25%, 26%, 27%, 28%, 29%, 30%, 31%, 32%, 33%, 34%, 35%, 36%, 37%, 38%, 39%, 40%, 41%, 42%, 43%, 44%, 45%, 46%, 47%, 48%, 49%, 50%, 51%, 52%, 53%, 54%, 55%, 56%, 57%, 58%, 59%, 60%, 61%, 62%, 63%, 64%, 65%, 66%, 67%, 68%, 69%, 70%, 71%, 72%, 73% 74%, 75%, 76%, 77%, 78%, 79%, 80%, 81%, 82%, 83%, 84%, 85%, 86%, 87%, 88%, 89%, 90%, 91%, 92%, 93%, 94%, 95%, 96%, 97%, 98%, 99%, or 100%, as compared to a parent polypeptide. In some embodiments, the substitution(s) that increase on-target binding of the variant Cas12i2 polypeptide by about 4%, 5%, 6%, 7%, 8%, 9%, 10%, 11%, 12%, 13%, 14%, 15%, 16%, 17%, 18%, 19%, 20%, 21%, 22%, 23%, 24%, 25%, 26%, 27%, 28%, 29%, 30%, 31%, 32%, 33%, 34%, 35%, 36%, 37%, 38%, 39%, 40%, 41%, 42%, 43%, 44%, 45%, 46%, 47%, 48%, 49%, 50%, 51%, 52%, 53%, 54%, 55%, 56%, 57%, 58%, 59%, 60%, 61%, 62%, 63%, 64%, 65%, 66%, 67%, 68%, 69%, 70%, 71%, 72%, 73% 74%, 75%, 76%, 77%, 78%, 79%, 80%, 81%, 82%, 83%, 84%, 85%, 86%, 87%, 88%, 89%, 90%, 91%, 92%, 93%, 94%, 95%, 96%, 97%, 98%, 99%, 100%, 110%, 120%, 130%, 140%, 150%, 160%, 170%, 180%, 190%, 200%, or more or any percentage therebetween further decrease off-target binding of the variant Cas12i2 polypeptide by about 4%, 5%, 6%, 7%, 8%, 9%, 10%, 11%, 12%, 13%, 14%, 15%, 16%, 17%, 18%, 19%, 20%, 21%, 22%, 23%, 24%, 25%, 26%, 27%, 28%, 29%, 30%, 31%, 32%, 33%, 34%, 35%, 36%, 37%, 38%, 39%, 40%, 41%, 42%, 43%, 44%, 45%, 46%, 47%, 48%, 49%, 50%, 51%, 52%, 53%, 54%, 55%, 56%, 57%, 58%, 59%, 60%, 61%, 62%, 63%, 64%, 65%, 66%, 67%, 68%, 69%, 70%, 71%, 72%, 73% 74%, 75%, 76%, 77%, 78%, 79%, 80%, 81%, 82%, 83%, 84%, 85%, 86%, 87%, 88%, 89%, 90%, 91%, 92%, 93%, 94%, 95%, 96%, 97%, 98%, 99%, or 100%, as compared to a parent polypeptide. In some embodiments, the substitution(s) that increase on-target binding affinity of the variant Cas12i2 polypeptide by about 4%, 5%, 6%, 7%, 8%, 9%, 10%, 11%, 12%, 13%, 14%, 15%, 16%, 17%, 18%, 19%, 20%, 21%, 22%, 23%, 24%, 25%, 26%, 27%, 28%, 29%, 30%, 31%, 32%, 33%, 34%, 35%, 36%, 37%, 38%, 39%, 40%, 41%, 42%, 43%, 44%, 45%, 46%, 47%, 48%, 49%, 50%, 51%, 52%, 53%, 54%, 55%, 56%, 57%, 58%, 59%, 60%, 61%, 62%, 63%, 64%, 65%, 66%, 67%, 68%, 69%, 70%, 71%, 72%, 73% 74%, 75%, 76%, 77%, 78%, 79%, 80%, 81%, 82%, 83%, 84%, 85%, 86%, 87%, 88%, 89%, 90%, 91%, 92%, 93%, 94%, 95%, 96%, 97%, 98%, 99%, 100%, 110%, 120%, 130%, 140%, 150%, 160%, 170%, 180%, 190%, 200%, or more or any percentage therebetween, further decrease off-target binding affinity of the variant Cas12i2 polypeptide by about 4%, 5%, 6%, 7%, 8%, 9%, 10%, 11%, 12%, 13%, 14%, 15%, 16%, 17%, 18%, 19%, 20%, 21%, 22%, 23%, 24%, 25%, 26%, 27%, 28%, 29%, 30%, 31%, 32%, 33%, 34%, 35%, 36%, 37%, 38%, 39%, 40%, 41%, 42%, 43%, 44%, 45%, 46%, 47%, 48%, 49%, 50%, 51%, 52%, 53%, 54%, 55%, 56%, 57%, 58%, 59%, 60%, 61%, 62%, 63%, 64%, 65%, 66%, 67%, 68%, 69%, 70%, 71%, 72%, 73% 74%, 75%, 76%, 77%, 78%, 79%, 80%, 81%, 82%, 83%, 84%, 85%, 86%, 87%, 88%, 89%, 90%, 91%, 92%, 93%, 94%, 95%, 96%, 97%, 98%, 99%, or 100%, as compared to a parent polypeptide.

[0583] In some embodiments, a variant Cas12i2 polypeptide of any one of SEQ ID NOs: 3-146 and 495-512 further comprises one or more substitutions listed in Table 11. In some embodiments, a variant Cas12i2 polypeptide comprises one or more substitutions listed in Table 2 and Table 11.

[0584] In some embodiments, the variant Cas12i2 polypeptide of any one of SEQ ID NOs: 3-146 and 495-512 comprising one or more substitutions listed in Table 4 and/or Table 5 and/or Table 6 and/or Table 7 and/or Table 8 and/or Table 9 and/or Table 10 and/or Table 11 exhibits increased on-target enzymatic activity. In some embodiments, the variant Cas12i2 polypeptide comprising one or more substitutions listed in Table 4 and/or Table 5 and/or Table 6 and/or Table 7 and/or Table 8 and/or Table 9 and/or Table 10 and/or Table 11 exhibits increased on-target enzymatic activity. In some embodiments, the variant Cas12i2 polypeptide exhibits increased on-target enzymatic activity (e.g., by about 4%, 5%, 6%, 7%, 8%, 9%, 10%, 11%, 12%, 13%, 14%, 15%, 16%, 17%, 18%, 19%, 20%, 21%, 22%, 23%, 24%, 25%, 26%, 27%, 28%, 29%, 30%, 31%, 32%, 33%, 34%, 35%, 36%, 37%, 38%, 39%, 40%, 41%, 42%, 43%, 44%, 45%, 46%, 47%, 48%, 49%, 50%, 51%, 52%, 53%, 54%, 55%, 56%, 57%, 58%, 59%, 60%, 61%, 62%, 63%, 64%, 65%, 66%, 67%, 68%, 69%, 70%, 71%, 72%, 73% 74%, 75%, 76%, 77%, 78%, 79%, 80%, 81%, 82%, 83%, 84%, 85%, 86%, 87%, 88%, 89%, 90%, 91%, 92%, 93%, 94%, 95%, 96%, 97%, 98%, 99%, 100%, 110%, 120%, 130%, 140%, 150%, 160%, 170%, 180%, 190%, 200%, or more or any percentage therebetween) as compared to a parent polypeptide.

[0585] In some embodiments, the variant Cas12i2 polypeptide of any one of SEQ ID NOs: 3-146 and 495-512 comprising one or more substitutions listed in Table 4 and/or Table 5 and/or Table 6 and/or Table 7 and/or Table 8 and/or Table 9 and/or Table 10 and/or Table 11 exhibits an increased ratio of on-target enzymatic activity to off-target enzymatic activity. In some embodiments, the variant Cas12i2 polypeptide comprising one or more substitutions listed in Table 4 and/or Table 5 and/or Table 6 and/or Table 7 and/or Table 8 and/or Table 9 and/or Table 10 and/or Table 11 exhibits an increased ratio of on-target enzymatic activity to off-target enzymatic activity. In some embodiments, on-target enzymatic activity of the variant Cas12i2 polypeptide (e.g., the variant Cas12i2 polypeptide of any one of SEQ ID NOs: 3-146 and 495-512 comprising one or more substitutions listed in Table 4 and/or Table 5 and/or Table 6 and/or Table 7 and/or Table 8 and/or Table 9 and/or Table 10 and/or Table 11) is at least 4%, 5%, 6%, 7%, 8%, 9%, 10%, 11%, 12%, 13%, 14%, 15%, 16%, 17%, 18%, 19%, 20%, 21%, 22%, 23%, 24%, 25%, 26%, 27%, 28%, 29%, 30%, 31%, 32%, 33%, 34%, 35%, 36%, 37%, 38%, 39%, 40%, 41%, 42%, 43%, 44%, 45%, 46%, 47%, 48%, 49%, 50%, 51%, 52%, 53%, 54%, 55%, 56%, 57%, 58%, 59%, 60%, 61%, 62%, 63%, 64%, 65%, 66%, 67%, 68%, 69%, 70%, 71%, 72%, 73% 74%, 75%, 76%, 77%, 78%, 79%, 80%, 81%, 82%, 83%, 84%, 85%, 86%, 87%, 88%, 89%, 90%, 91%, 92%, 93%, 94%, 95%, 96%, 97%, 98%, 99%, 100%, 110%, 120%, 130%, 140%, 150%, 160%, 170%, 180%, 190%, 200%, or more or any percentage therebetween higher than off-target enzymatic activity of the variant Cas12i2 polypeptide, as compared to a parent polypeptide. In some embodiments, on-target enzymatic activity of the variant Cas12i2 polypeptide (e.g., the variant Cas12i2 polypeptide comprising one or more substitutions listed in Table 4 and/or Table 5 and/or Table 6 and/or Table 7 and/or Table 8 and/or Table 9 and/or Table 10 and/or Table 11) is at least 4%, 5%, 6%, 7%, 8%, 9%, 10%, 11%, 12%, 13%, 14%, 15%, 16%, 17%, 18%, 19%, 20%, 21%, 22%, 23%, 24%, 25%, 26%, 27%, 28%, 29%, 30%, 31%, 32%, 33%, 34%, 35%, 36%, 37%, 38%, 39%, 40%, 41%, 42%, 43%, 44%, 45%, 46%, 47%, 48%, 49%, 50%, 51%, 52%, 53%, 54%, 55%, 56%, 57%, 58%, 59%, 60%, 61%, 62%, 63%, 64%, 65%, 66%, 67%, 68%, 69%, 70%, 71%, 72%, 73% 74%, 75%, 76%, 77%, 78%, 79%, 80%, 81%, 82%, 83%, 84%, 85%, 86%, 87%, 88%, 89%, 90%, 91%, 92%, 93%, 94%, 95%, 96%, 97%, 98%, 99%, 100%, 110%, 120%, 130%, 140%, 150%, 160%, 170%, 180%, 190%, 200%, or more or any percentage therebetween higher than off-target enzymatic activity of the variant Cas12i2 polypeptide, as compared to a parent polypeptide.

[0586] In some embodiments, enzymatic activity of the variant Cas12i2 polypeptide (e.g., the variant Cas12i2 polypeptide of any one of SEQ ID NOs: 3-146 and 495-512 at an off-target locus is no more than 10% (e.g., 10%, 9%, 8%, 7%, 6%, 5%, 4%, 3%, 2%, 1%, or 0%) of the enzymatic activity at the on-target locus. In some embodiments, enzymatic activity of the variant Cas12i2 polypeptide (e.g., the variant Cas12i2 polypeptide of any one of SEQ ID NOs: 3-146 and 495-512 comprising one or more substitutions listed in Table 4 and/or Table 5 and/or Table 6 and/or Table 7 and/or Table 8 and/or Table 9 and/or Table 10 and/or Table 11) at an off-target locus is no more than 10% (e.g., 10%, 9%, 8%, 7%, 6%, 5%, 4%, 3%, 2%, 1%, or 0%) of the enzymatic activity at the on-target locus. In some embodiments, enzymatic activity of the variant Cas12i2 polypeptide (e.g., the variant Cas12i2 polypeptide of any one of SEQ ID NOs: 3-146 and 495-512 at an off-target locus is no more than 5% (e.g., 5%, 4%, 3%, 2%, 1%, or 0%) of the enzymatic activity at the on-target locus. In some embodiments, enzymatic activity of the variant Cas12i2 polypeptide (e.g., the variant Cas12i2 polypeptide of any one of SEQ ID NOs: 3-146 and 495-512 comprising one or more substitutions listed in Table 4 and/or Table 5 and/or Table 6 and/or Table 7 and/or Table 8 and/or Table 9 and/or Table 10 and/or Table 11) at an off-target locus is no more than 5% (e.g., 5%, 4%, 3%, 2%, 1%, or 0%) of the enzymatic activity at the on-target locus. By comparison, enzymatic activity of SpCas9 at an off-target locus is up to 95% (e.g., 95%, 94%, 93%, 92%, 91%, 90%, 89%, 88%, 87%, 86%, 85%, 84%, 83%, 82%, 81%, 80%, 79%, 78%, 77%, 76%, 75%, 74%, 73%, 72%, 71%, 70%, 69%, 68%, 67%, 66%, 65%, 64%, 63%, 62%, 61%, 60%, 59%, 58%, 57%, 56%, 55%, 54%, 53%, 52%, 51%, 50%, 49%, 48%, 47%, 46%, 45%, 44%, 43%, 42%, 41%, 40%, 39%, 38%, 37%, 36%, 35%, 34%, 33%, 32%, 31%, 30%, 29%, 28%, 27%, 26%, 25%, 24%, 23%, 22%, 21%, 20%, 19%, 18%, 17%, 16%, 15%, 14%, 13%, 12%, 11%, 10%, 9%, 8%, 7%, 6%, 5%, 4%, 3%, 2%, 1%, or 0%) of the enzymatic activity at the on-target locus. See Example 16.

[0587] In some embodiments, editing efficiency of the variant Cas12i2 polypeptide (e.g., the variant Cas12i2 polypeptide of any one of SEQ ID NOs: 3-146 and 495-512 at an off-target locus is no more than 10% (e.g., 10%, 9%, 8%, 7%, 6%, 5%, 4%, 3%, 2%, 1%, or 0%) of the editing efficiency at the on-target locus. In some embodiments, editing efficiency of the variant Cas12i2 polypeptide (e.g., the variant Cas12i2 polypeptide of any one of SEQ ID NOs: 3-146 and 495-512 comprising one or more substitutions listed in Table 4 and/or Table 5 and/or Table 6 and/or Table 7 and/or Table 8 and/or Table 9 and/or Table 10 and/or Table 11) at an off-target locus is no more than 10% (e.g., 10%, 9%, 8%, 7%, 6%, 5%, 4%, 3%, 2%, 1%, or 0%) of the editing efficiency at the on-target locus. In some embodiments, editing efficiency of the variant Cas12i2 polypeptide (e.g., the variant Cas12i2 polypeptide of any one of SEQ ID NOs: 3-146 and 495-512 at an off-target locus is no more than 5% (e.g., 5%, 4%, 3%, 2%, 1%, or 0%) of the editing efficiency at the on-target locus. In some embodiments, editing efficiency of the variant Cas12i2 polypeptide (e.g., the variant Cas12i2 polypeptide of any one of SEQ ID NOs: 3-146 and 495-512 comprising one or more substitutions listed in Table 4 and/or Table 5 and/or Table 6 and/or Table 7 and/or Table 8 and/or Table 9 and/or Table 10 and/or Table 11) at an off-target locus is no more than 5% (e.g., 5%, 4%, 3%, 2%, 1%, or 0%) of the editing efficiency at the on-target locus. By comparison, editing efficiency of SpCas9 at an off-target locus is up to 95% (e.g., 95%, 94%, 93%, 92%, 91%, 90%, 89%, 88%, 87%, 86%, 85%, 84%, 83%, 82%, 81%, 80%, 79%, 78%, 77%, 76%, 75%, 74%, 73%, 72%, 71%, 70%, 69%, 68%, 67%, 66%, 65%, 64%, 63%, 62%, 61%, 60%, 59%, 58%, 57%, 56%, 55%, 54%, 53%, 52%, 51%, 50%, 49%, 48%, 47%, 46%, 45%, 44%, 43%, 42%, 41%, 40%, 39%, 38%, 37%, 36%, 35%, 34%, 33%, 32%, 31%, 30%, 29%, 28%, 27%, 26%, 25%, 24%, 23%, 22%, 21%, 20%, 19%, 18%, 17%, 16%, 15%, 14%, 13%, 12%, 11%, 10%, 9%, 8%, 7%, 6%, 5%, 4%, 3%, 2%, 1%, or 0%) of the editing efficiency at the on-target locus. See Example 16.

[0588] In some embodiments, editing by the variant Cas12i2 polypeptide (e.g., the variant Cas12i2 polypeptide of any one of SEQ ID NOs: 3-146 and 495-512 at an off-target locus is no more than 10% (e.g., 10%, 9%, 8%, 7%, 6%, 5%, 4%, 3%, 2%, 1%, or 0%) of the editing at the on-target locus. In some embodiments, editing by the variant Cas12i2 polypeptide (e.g., the variant Cas12i2 polypeptide of any one of SEQ ID NOs: 3-146 and 495-512 comprising one or more substitutions listed in Table 4 and/or Table 5 and/or Table 6 and/or Table 7 and/or Table 8 and/or Table 9 and/or Table 10 and/or Table 11) at an off-target locus is no more than 10% (e.g., 10%, 9%, 8%, 7%, 6%, 5%, 4%, 3%, 2%, 1%, or 0%) of the editing at the on-target locus. In some embodiments, editing by the variant Cas12i2 polypeptide (e.g., the variant Cas12i2 polypeptide of any one of SEQ ID NOs: 3-146 and 495-512 at an off-target locus is no more than 5% (e.g., 5%, 4%, 3%, 2%, 1%, or 0%) of the editing at the on-target locus. In some embodiments, editing by the variant Cas12i2 polypeptide (e.g., the variant Cas12i2 polypeptide of any one of SEQ ID NOs: 3-146 and 495-512 comprising one or more substitutions listed in Table 4 and/or Table 5 and/or Table 6 and/or Table 7 and/or Table 8 and/or Table 9 and/or Table 10 and/or Table 11) at an off-target locus is no more than 5% (e.g., 5%, 4%, 3%, 2%, 1%, or 0%) of the editing at the on-target locus. By comparison, editing of SpCas9 at an off-target locus is up to 95% (e.g., 95%, 94%, 93%, 92%, 91%, 90%, 89%, 88%, 87%, 86%, 85%, 84%, 83%, 82%, 81%, 80%, 79%, 78%, 77%, 76%, 75%, 74%, 73%, 72%, 71%, 70%, 69%, 68%, 67%, 66%, 65%, 64%, 63%, 62%, 61%, 60%, 59%, 58%, 57%, 56%, 55%, 54%, 53%, 52%, 51%, 50%, 49%, 48%, 47%, 46%, 45%, 44%, 43%, 42%, 41%, 40%, 39%, 38%, 37%, 36%, 35%, 34%, 33%, 32%, 31%, 30%, 29%, 28%, 27%, 26%, 25%, 24%, 23%, 22%, 21%, 20%, 19%, 18%, 17%, 16%, 15%, 14%, 13%, 12%, 11%, 10%, 9%, 8%, 7%, 6%, 5%, 4%, 3%, 2%, 1%, or 0%) of the editing at the on-target locus. See Example 16.

[0589] In some aspects, a variant Cas12i2 polypeptide comprising an alteration that increases on-target specificity relative to a parent polypeptide is an alteration that decreases the catalysis rate (Kcat) compared to a parent polypeptide. A decreased (e.g., slower) Kcat allows for the variant Cas12i2 polypeptide to discriminate between an on-target sequence and an off-target sequence. In some embodiments, the alteration that decreases the catalysis rate is substituting one or more amino acids to an alanine, serine, threonine, valine, leucine, methionine, asparagine, or isoleucine. In some embodiments, the variant Cas12i2 polypeptide comprises a substitution of one or more amino acids 600-605, 835-840, or 1020-1030 to any one of an alanine, serine, threonine, valine, leucine, methionine, asparagine, or isoleucine. In some embodiments, the variant Cas12i2 polypeptide comprises an alteration of one or more amino acids in at least one RuvC domain/motif (e.g., RuvC1, RuvC2, or RuvC) to an alanine, serine, threonine, valine, leucine, methionine, asparagine, or isoleucine. In some embodiments, the substitution(s) decrease the Kcat of the variant Cas12i2 polypeptide by about 4%, 5%, 6%, 7%, 8%, 9%, 10%, 11%, 12%, 13%, 14%, 15%, 16%, 17%, 18%, 19%, 20%, 21%, 22%, 23%, 24%, 25%, 26%, 27%, 28%, 29%, 30%, 31%, 32%, 33%, 34%, 35%, 36%, 37%, 38%, 39%, 40%, 41%, 42%, 43%, 44%, 45%, 46%, 47%, 48%, 49%, 50%, 51%, 52%, 53%, 54%, 55%, 56%, 57%, 58%, 59%, 60%, 61%, 62%, 63%, 64%, 65%, 66%, 67%, 68%, 69%, 70%, 71%, 72%, 73% 74%, 75%, 76%, 77%, 78%, 79%, 80%, 81%, 82%, 83%, 84%, 85%, 86%, 87%, 88%, 89%, 90%, 91%, 92%, 93%, 94%, 95%, 96%, 97%, 98%, or 99%, as compared to a parent polypeptide.

[0590] In some embodiments, the substitution(s) that decrease the Kcat of the variant Cas12i2 polypeptide further increase on-target specificity by about 4%, 5%, 6%, 7%, 8%, 9%, 10%, 11%, 12%, 13%, 14%, 15%, 16%, 17%, 18%, 19%, 20%, 21%, 22%, 23%, 24%, 25%, 26%, 27%, 28%, 29%, 30%, 31%, 32%, 33%, 34%, 35%, 36%, 37%, 38%, 39%, 40%, 41%, 42%, 43%, 44%, 45%, 46%, 47%, 48%, 49%, 50%, 51%, 52%, 53%, 54%, 55%, 56%, 57%, 58%, 59%, 60%, 61%, 62%, 63%, 64%, 65%, 66%, 67%, 68%, 69%, 70%, 71%, 72%, 73% 74%, 75%, 76%, 77%, 78%, 79%, 80%, 81%, 82%, 83%, 84%, 85%, 86%, 87%, 88%, 89%, 90%, 91%, 92%, 93%, 94%, 95%, 96%, 97%, 98%, 99%, 100%, 110%, 120%, 130%, 140%, 150%, 160%, 170%, 180%, 190%, 200%, or more or any percentage therebetween, as compared to a parent polypeptide. In some embodiments, the substitution(s) that decrease the Kcat of the variant Cas12i2 polypeptide further increase on-target binding of the variant Cas12i2 polypeptide by about 4%, 5%, 6%, 7%, 8%, 9%, 10%, 11%, 12%, 13%, 14%, 15%, 16%, 17%, 18%, 19%, 20%, 21%, 22%, 23%, 24%, 25%, 26%, 27%, 28%, 29%, 30%, 31%, 32%, 33%, 34%, 35%, 36%, 37%, 38%, 39%, 40%, 41%, 42%, 43%, 44%, 45%, 46%, 47%, 48%, 49%, 50%, 51%, 52%, 53%, 54%, 55%, 56%, 57%, 58%, 59%, 60%, 61%, 62%, 63%, 64%, 65%, 66%, 67%, 68%, 69%, 70%, 71%, 72%, 73% 74%, 75%, 76%, 77%, 78%, 79%, 80%, 81%, 82%, 83%, 84%, 85%, 86%, 87%, 88%, 89%, 90%, 91%, 92%, 93%, 94%, 95%, 96%, 97%, 98%, 99%, 100%, 110%, 120%, 130%, 140%, 150%, 160%, 170%, 180%, 190%, 200%, or more or any percentage therebetween, as compared to a parent polypeptide. In some embodiments, the substitution(s) that decrease the Kcat of the variant Cas12i2 polypeptide further increase on-target binding affinity of the variant Cas12i2 polypeptide by about 4%, 5%, 6%, 7%, 8%, 9%, 10%, 11%, 12%, 13%, 14%, 15%, 16%, 17%, 18%, 19%, 20%, 21%, 22%, 23%, 24%, 25%, 26%, 27%, 28%, 29%, 30%, 31%, 32%, 33%, 34%, 35%, 36%, 37%, 38%, 39%, 40%, 41%, 42%, 43%, 44%, 45%, 46%, 47%, 48%, 49%, 50%, 51%, 52%, 53%, 54%, 55%, 56%, 57%, 58%, 59%, 60%, 61%, 62%, 63%, 64%, 65%, 66%, 67%, 68%, 69%, 70%, 71%, 72%, 73% 74%, 75%, 76%, 77%, 78%, 79%, 80%, 81%, 82%, 83%, 84%, 85%, 86%, 87%, 88%, 89%, 90%, 91%, 92%, 93%, 94%, 95%, 96%, 97%, 98%, 99%, 100%, 110%, 120%, 130%, 140%, 150%, 160%, 170%, 180%, 190%, 200%, or more or any percentage therebetween, as compared to a parent polypeptide.

[0591] In some embodiments, the substitution(s) that decrease the Kcat of the variant Cas12i2 polypeptide further decrease off-target specificity by about 4%, 5%, 6%, 7%, 8%, 9%, 10%, 11%, 12%, 13%, 14%, 15%, 16%, 17%, 18%, 19%, 20%, 21%, 22%, 23%, 24%, 25%, 26%, 27%, 28%, 29%, 30%, 31%, 32%, 33%, 34%, 35%, 36%, 37%, 38%, 39%, 40%, 41%, 42%, 43%, 44%, 45%, 46%, 47%, 48%, 49%, 50%, 51%, 52%, 53%, 54%, 55%, 56%, 57%, 58%, 59%, 60%, 61%, 62%, 63%, 64%, 65%, 66%, 67%, 68%, 69%, 70%, 71%, 72%, 73% 74%, 75%, 76%, 77%, 78%, 79%, 80%, 81%, 82%, 83%, 84%, 85%, 86%, 87%, 88%, 89%, 90%, 91%, 92%, 93%, 94%, 95%, 96%, 97%, 98%, 99%, or 100%, as compared to a parent polypeptide. In some embodiments, the substitution(s) that decrease the Kcat of the variant Cas12i2 polypeptide further decrease off-target binding of the variant Cas12i2 polypeptide by about 4%, 5%, 6%, 7%, 8%, 9%, 10%, 11%, 12%, 13%, 14%, 15%, 16%, 17%, 18%, 19%, 20%, 21%, 22%, 23%, 24%, 25%, 26%, 27%, 28%, 29%, 30%, 31%, 32%, 33%, 34%, 35%, 36%, 37%, 38%, 39%, 40%, 41%, 42%, 43%, 44%, 45%, 46%, 47%, 48%, 49%, 50%, 51%, 52%, 53%, 54%, 55%, 56%, 57%, 58%, 59%, 60%, 61%, 62%, 63%, 64%, 65%, 66%, 67%, 68%, 69%, 70%, 71%, 72%, 73% 74%, 75%, 76%, 77%, 78%, 79%, 80%, 81%, 82%, 83%, 84%, 85%, 86%, 87%, 88%, 89%, 90%, 91%, 92%, 93%, 94%, 95%, 96%, 97%, 98%, 99%, or 100%, as compared to a parent polypeptide. In some embodiments, the substitution(s) that decrease the Kcat of the variant Cas12i2 polypeptide further decrease off-target binding affinity of the variant Cas12i2 polypeptide by about 4%, 5%, 6%, 7%, 8%, 9%, 10%, 11%, 12%, 13%, 14%, 15%, 16%, 17%, 18%, 19%, 20%, 21%, 22%, 23%, 24%, 25%, 26%, 27%, 28%, 29%, 30%, 31%, 32%, 33%, 34%, 35%, 36%, 37%, 38%, 39%, 40%, 41%, 42%, 43%, 44%, 45%, 46%, 47%, 48%, 49%, 50%, 51%, 52%, 53%, 54%, 55%, 56%, 57%, 58%, 59%, 60%, 61%, 62%, 63%, 64%, 65%, 66%, 67%, 68%, 69%, 70%, 71%, 72%, 73% 74%, 75%, 76%, 77%, 78%, 79%, 80%, 81%, 82%, 83%, 84%, 85%, 86%, 87%, 88%, 89%, 90%, 91%, 92%, 93%, 94%, 95%, 96%, 97%, 98%, 99%, or 100%, as compared to a parent polypeptide.

[0592] Non-limiting examples of alterations that can alter the Kcat of a variant Cas12i2 polypeptide are substitutions listed in Table 12. In some embodiments, a variant Cas12i2 polypeptide comprising one or more substitutions listed in Table 12 exhibits increased on-target specificity relative to a parent polypeptide. In some embodiments, a variant Cas12i2 polypeptide comprising one or more substitutions listed in Table 11 exhibits increased on-target binding relative to a parent polypeptide. In some embodiments, a variant Cas12i2 polypeptide comprising one or more substitutions listed in Table 12 exhibits increased on-target binding affinity relative to a parent polypeptide. In some embodiments, a variant Cas12i2 polypeptide comprising one or more substitutions listed in Table 12 exhibits decreased off-target specificity relative to a parent polypeptide. In some embodiments, a variant Cas12i2 polypeptide comprising one or more substitutions listed in Table 11 exhibits decreased off-target binding relative to a parent polypeptide. In some embodiments, a variant Cas12i2 polypeptide comprising one or more substitutions listed in Table 12 exhibits decreased off-target binding affinity relative to a parent polypeptide.

TABLE 12
Substitutions increasing on-target specificity.

| | |
|---|---|
| Q600 | A, S, T, V |
| Q602 | L, A, S, M |
| T603 | S, V, N, A |
| L836 | S, T, V, N, A |
| S837 | A, T, V, L, I |
| A1022 | S |
| I1026 | V, A, N |

[0593] In some embodiments, the substitution(s) that decrease the Kcat of the variant Cas12i2 polypeptide by about 4%, 5%, 6%, 7%, 8%, 9%, 10%, 11%, 12%, 13%, 14%, 15%, 16%, 17%, 18%, 19%, 20%, 21%, 22%, 23%, 24%, 25%, 26%, 27%, 28%, 29%, 30%, 31%, 32%, 33%, 34%, 35%, 36%, 37%, 38%, 39%, 40%, 41%, 42%, 43%, 44%, 45%, 46%, 47%, 48%, 49%, 50%, 51%, 52%, 53%, 54%, 55%, 56%, 57%, 58%, 59%, 60%, 61%, 62%, 63%, 64%, 65%, 66%, 67%, 68%, 69%, 70%, 71%, 72%, 73% 74%, 75%, 76%, 77%, 78%, 79%, 80%, 81%, 82%, 83%, 84%, 85%, 86%, 87%, 88%, 89%, 90%, 91%, 92%, 93%, 94%, 95%, 96%, 97%, 98%, 99%, 100%, 110%, 120%, 130%, 140%, 150%, 160%, 170%, 180%, 190%, 200%, or more or any percentage therebetween further increase on-target specificity by about 4%, 5%, 6%, 7%, 8%, 9%, 10%, 11%, 12%, 13%, 14%, 15%, 16%, 17%, 18%, 19%, 20%, 21%, 22%, 23%, 24%, 25%, 26%, 27%, 28%, 29%, 30%, 31%, 32%, 33%, 34%, 35%, 36%, 37%, 38%, 39%, 40%, 41%, 42%, 43%, 44%, 45%, 46%, 47%, 48%, 49%, 50%, 51%, 52%, 53%, 54%, 55%, 56%, 57%, 58%, 59%, 60%, 61%, 62%, 63%, 64%, 65%, 66%, 67%, 68%, 69%, 70%, 71%, 72%, 73% 74%, 75%, 76%, 77%, 78%, 79%, 80%, 81%, 82%, 83%, 84%, 85%, 86%, 87%, 88%, 89%, 90%, 91%, 92%, 93%, 94%, 95%, 96%, 97%, 98%, 99%, 100%, 110%, 120%, 130%, 140%, 150%, 160%, 170%, 180%, 190%, 200%, or more or any percentage therebetween and decrease off-target specificity by about 4%, 5%, 6%, 7%, 8%, 9%, 10%, 11%, 12%, 13%, 14%, 15%, 16%, 17%, 18%, 19%, 20%, 21%, 22%, 23%, 24%, 25%, 26%, 27%, 28%, 29%, 30%, 31%, 32%, 33%, 34%, 35%, 36%, 37%, 38%, 39%, 40%, 41%, 42%, 43%, 44%, 45%, 46%, 47%, 48%, 49%, 50%, 51%, 52%, 53%, 54%, 55%, 56%, 57%, 58%, 59%, 60%, 61%, 62%, 63%, 64%, 65%, 66%, 67%, 68%, 69%, 70%, 71%, 72%, 73% 74%, 75%, 76%, 77%, 78%, 79%, 80%, 81%, 82%, 83%, 84%, 85%, 86%, 87%, 88%, 89%, 90%, 91%, 92%, 93%, 94%, 95%, 96%, 97%, 98%, 99%, or 100%, as compared to a parent polypeptide.

[0594] In some embodiments, the substitution(s) that decrease the Kcat of the variant Cas12i2 polypeptide by about 4%, 5%, 6%, 7%, 8%, 9%, 10%, 11%, 12%, 13%, 14%, 15%, 16%, 17%, 18%, 19%, 20%, 21%, 22%, 23%, 24%, 25%, 26%, 27%, 28%, 29%, 30%, 31%, 32%, 33%, 34%, 35%, 36%, 37%, 38%, 39%, 40%, 41%, 42%, 43%, 44%, 45%, 46%, 47%, 48%, 49%, 50%, 51%, 52%, 53%, 54%, 55%, 56%, 57%, 58%, 59%, 60%, 61%, 62%, 63%, 64%, 65%, 66%, 67%, 68%, 69%, 70%, 71%, 72%, 73% 74%, 75%, 76%, 77%, 78%, 79%, 80%, 81%, 82%, 83%, 84%, 85%, 86%, 87%, 88%, 89%, 90%, 91%, 92%, 93%, 94%, 95%, 96%, 97%, 98%, 99%, 100%, 110%, 120%, 130%, 140%, 150%, 160%, 170%, 180%, 190%, 200%, or more or any percentage therebetween further increase on-target binding by about 4%, 5%, 6%, 7%, 8%, 9%, 10%, 11%, 12%, 13%, 14%, 15%, 16%, 17%, 18%, 19%, 20%, 21%, 22%, 23%, 24%, 25%, 26%, 27%, 28%, 29%, 30%, 31%, 32%, 33%, 34%, 35%, 36%, 37%, 38%, 39%, 40%, 41%, 42%, 43%, 44%, 45%, 46%, 47%, 48%, 49%, 50%, 51%, 52%, 53%, 54%, 55%, 56%, 57%, 58%, 59%, 60%, 61%, 62%, 63%, 64%, 65%, 66%, 67%, 68%, 69%, 70%, 71%, 72%, 73% 74%, 75%, 76%, 77%, 78%, 79%, 80%, 81%, 82%, 83%, 84%, 85%, 86%, 87%, 88%, 89%, 90%, 91%, 92%, 93%, 94%, 95%, 96%, 97%, 98%, 99%, 100%, 110%, 120%, 130%, 140%, 150%, 160%, 170%, 180%, 190%, 200%, or more or any percentage therebetween and decrease off-target binding by about 4%, 5%, 6%, 7%, 8%, 9%, 10%, 11%, 12%, 13%, 14%, 15%, 16%, 17%, 18%, 19%, 20%, 21%, 22%, 23%, 24%, 25%, 26%, 27%, 28%, 29%, 30%, 31%, 32%, 33%, 34%, 35%, 36%, 37%, 38%, 39%, 40%, 41%, 42%, 43%, 44%, 45%, 46%, 47%, 48%, 49%, 50%, 51%, 52%, 53%, 54%, 55%, 56%, 57%, 58%, 59%, 60%, 61%, 62%, 63%, 64%, 65%, 66%, 67%, 68%, 69%, 70%, 71%, 72%, 73% 74%, 75%, 76%, 77%, 78%, 79%, 80%, 81%, 82%, 83%, 84%, 85%, 86%, 87%, 88%, 89%, 90%, 91%, 92%, 93%, 94%, 95%, 96%, 97%, 98%, 99%, or 100%, as compared to a parent polypeptide.

[0595] In some embodiments, the substitution(s) that decrease the Kcat of the variant Cas12i2 polypeptide by about 4%, 5%, 6%, 7%, 8%, 9%, 10%, 11%, 12%, 13%, 14%, 15%, 16%, 17%, 18%, 19%, 20%, 21%, 22%, 23%, 24%, 25%, 26%, 27%, 28%, 29%, 30%, 31%, 32%, 33%, 34%, 35%, 36%, 37%, 38%, 39%, 40%, 41%, 42%, 43%, 44%, 45%, 46%, 47%, 48%, 49%, 50%, 51%, 52%, 53%, 54%, 55%, 56%, 57%, 58%, 59%, 60%, 61%, 62%, 63%, 64%, 65%, 66%, 67%, 68%, 69%, 70%, 71%, 72%, 73% 74%, 75%, 76%, 77%, 78%, 79%, 80%, 81%, 82%, 83%, 84%, 85%, 86%, 87%, 88%, 89%, 90%, 91%, 92%, 93%, 94%, 95%, 96%, 97%, 98%, 99%, 100%, 110%, 120%, 130%, 140%, 150%, 160%, 170%, 180%, 190%, 200%, or more or any percentage therebetween further increase on-target binding affinity by about 4%, 5%, 6%, 7%, 8%, 9%, 10%, 11%, 12%, 13%, 14%, 15%, 16%, 17%, 18%, 19%, 20%, 21%, 22%, 23%, 24%, 25%, 26%, 27%, 28%, 29%, 30%, 31%, 32%, 33%, 34%, 35%, 36%, 37%, 38%, 39%, 40%, 41%, 42%, 43%, 44%, 45%, 46%, 47%, 48%, 49%, 50%, 51%, 52%, 53%, 54%, 55%, 56%, 57%, 58%, 59%, 60%, 61%, 62%, 63%, 64%, 65%, 66%, 67%, 68%, 69%, 70%, 71%, 72%, 73% 74%, 75%, 76%, 77%, 78%, 79%, 80%, 81%, 82%, 83%, 84%, 85%, 86%, 87%, 88%, 89%, 90%, 91%, 92%, 93%, 94%, 95%, 96%, 97%, 98%, 99%, 100%, 110%, 120%, 130%, 140%, 150%, 160%, 170%, 180%, 190%, 200%, or more or any percentage therebetween and decrease off-target binding affinity by about 4%, 5%, 6%, 7%, 8%, 9%, 10%, 11%, 12%, 13%, 14%, 15%, 16%, 17%, 18%, 19%, 20%, 21%, 22%, 23%, 24%, 25%, 26%, 27%, 28%, 29%, 30%, 31%, 32%, 33%, 34%, 35%, 36%, 37%, 38%, 39%, 40%, 41%, 42%, 43%, 44%, 45%, 46%, 47%, 48%, 49%, 50%, 51%, 52%, 53%, 54%, 55%, 56%, 57%, 58%, 59%, 60%, 61%, 62%, 63%, 64%, 65%, 66%, 67%, 68%, 69%, 70%, 71%, 72%, 73% 74%, 75%, 76%, 77%, 78%, 79%, 80%, 81%, 82%, 83%, 84%, 85%, 86%, 87%, 88%, 89%, 90%, 91%, 92%, 93%, 94%, 95%, 96%, 97%, 98%, 99%, or 100%, as compared to a parent polypeptide.

[0596] In some embodiments, the alteration that decreases the Kcat of the variant Cas12i2 polypeptide (e.g., a substitution listed in Table 12) further increases the ratio of on-target ternary complex formation to off-target ternary complex formation. In some embodiments, the alteration that decreases the Kcat increases the ratio of on-target ternary complex formation to off-target ternary complex formation by about 4%, 5%, 6%, 7%, 8%, 9%, 10%, 11%, 12%, 13%, 14%, 15%, 16%, 17%, 18%, 19%, 20%, 21%, 22%, 23%, 24%, 25%, 26%, 27%, 28%, 29%, 30%, 31%, 32%, 33%, 34%, 35%, 36%, 37%, 38%, 39%, 40%, 41%, 42%, 43%, 44%, 45%, 46%, 47%, 48%, 49%, 50%, 51%, 52%, 53%, 54%, 55%, 56%, 57%, 58%, 59%, 60%, 61%, 62%, 63%, 64%, 65%, 66%, 67%, 68%, 69%, 70%, 71%, 72%, 73% 74%, 75%, 76%, 77%, 78%, 79%, 80%, 81%, 82%, 83%, 84%, 85%, 86%, 87%, 88%, 89%, 90%, 91%, 92%, 93%, 94%, 95%, 96%, 97%, 98%, 99%, 100%, 110%, 120%, 130%, 140%, 150%, 160%, 170%, 180%, 190%, 200%, or more or any percentage therebetween as compared to a parent polypeptide.

[0597] In some embodiments, a variant Cas12i2 polypeptide of any one of SEQ ID NOs: 3-146 and 495-512 further comprises one or more substitutions listed in Table 12. In some embodiments, a variant Cas12i2 polypeptide comprises one or more substitutions listed in Table 2 and Table 12.

[0598] In some embodiments, the variant Cas12i2 polypeptide of any one of SEQ ID NOs: 3-146 and 495-512 comprising one or more substitutions listed in Table 4 and/or Table 5 and/or Table 6 and/or Table 7 and/or Table 8 and/or Table 9 and/or Table 10 and/or Table 11 and/or Table 12 exhibits increased on-target enzymatic activity. In some embodiments, the variant Cas12i2 polypeptide comprising one or more substitutions listed in Table 4 and/or Table 5 and/or Table 6 and/or Table 7 and/or Table 8 and/or Table 9 and/or Table 10 and/or Table 11 and/or Table 12 exhibits increased on-target enzymatic activity. In some embodiments, the variant Cas12i2 polypeptide exhibits increased on-target enzymatic activity (e.g., by about 4%, 5%, 6%, 7%, 8%, 9%, 10%, 11%, 12%, 13%, 14%, 15%, 16%, 17%, 18%, 19%, 20%, 21%, 22%, 23%, 24%, 25%, 26%, 27%, 28%, 29%, 30%, 31%, 32%, 33%, 34%, 35%, 36%, 37%, 38%, 39%, 40%, 41%, 42%, 43%, 44%, 45%, 46%, 47%, 48%, 49%, 50%, 51%, 52%, 53%, 54%, 55%, 56%, 57%, 58%, 59%, 60%, 61%, 62%, 63%, 64%, 65%, 66%, 67%, 68%, 69%, 70%, 71%, 72%, 73% 74%, 75%, 76%, 77%, 78%, 79%, 80%, 81%, 82%, 83%, 84%, 85%, 86%, 87%, 88%, 89%, 90%, 91%, 92%, 93%, 94%, 95%, 96%, 97%, 98%, 99%, 100%, 110%, 120%, 130%, 140%, 150%, 160%, 170%, 180%, 190%, 200%, or more or any percentage therebetween) as compared to a parent polypeptide.

[0599] In some embodiments, the variant Cas12i2 polypeptide of any one of SEQ ID NOs: 3-146 and 495-512 comprising one or more substitutions listed in Table 4 and/or Table 5 and/or Table 6 and/or Table 7 and/or Table 8 and/or Table 9 and/or Table 10 and/or Table 11 and/or Table 12 exhibits an increased ratio of on-target enzymatic activity to off-target enzymatic activity. In some embodiments, the variant Cas12i2 polypeptide comprising one or more substitutions listed in Table 4 and/or Table 5 and/or Table 6 and/or Table 7 and/or Table 8 and/or Table 9 and/or Table 10 and/or Table 11 and/or Table 12 exhibits an increased ratio of on-target enzymatic activity to off-target enzymatic activity. In some embodiments, on-target enzymatic activity of the variant Cas12i2 polypeptide (e.g., the variant Cas12i2 polypeptide of any one of SEQ ID NOs: 3-146 and 495-512 comprising one or more substitutions listed in Table 4 and/or Table 5 and/or Table 6 and/or Table 7 and/or Table 8 and/or Table 9 and/or Table 10 and/or Table 11 and/or Table 12) is at least 4%, 5%, 6%, 7%, 8%, 9%, 10%, 11%, 12%, 13%, 14%, 15%, 16%, 17%, 18%, 19%, 20%, 21%, 22%, 23%, 24%, 25%, 26%, 27%, 28%, 29%, 30%, 31%, 32%, 33%, 34%, 35%, 36%, 37%, 38%, 39%, 40%, 41%, 42%, 43%, 44%, 45%, 46%, 47%, 48%, 49%, 50%, 51%, 52%, 53%, 54%, 55%, 56%, 57%, 58%, 59%, 60%, 61%, 62%, 63%, 64%, 65%, 66%, 67%, 68%, 69%, 70%, 71%, 72%, 73% 74%, 75%, 76%, 77%, 78%, 79%, 80%, 81%, 82%, 83%, 84%, 85%, 86%, 87%, 88%, 89%, 90%, 91%, 92%, 93%, 94%, 95%, 96%, 97%, 98%, 99%, 100%, 110%, 120%, 130%, 140%, 150%, 160%, 170%, 180%, 190%, 200%, or more or any percentage therebetween higher than off-target enzymatic activity of the variant Cas12i2 polypeptide, as compared to a parent polypeptide. In some embodiments, on-target enzymatic activity of the variant Cas12i2 polypeptide (e.g., the variant Cas12i2 polypeptide comprising one or more substitutions listed in Table 4 and/or Table 5 and/or Table 6 and/or Table 7 and/or Table 8 and/or Table 9 and/or Table 10 and/or Table 11 and/or Table 12) is at least 4%, 5%, 6%, 7%, 8%, 9%, 10%, 11%, 12%, 13%, 14%, 15%, 16%, 17%, 18%, 19%, 20%, 21%, 22%, 23%, 24%, 25%, 26%, 27%, 28%, 29%, 30%, 31%, 32%, 33%, 34%, 35%, 36%, 37%, 38%, 39%, 40%, 41%, 42%, 43%, 44%, 45%, 46%, 47%, 48%, 49%, 50%, 51%, 52%, 53%, 54%, 55%, 56%, 57%, 58%, 59%, 60%, 61%, 62%, 63%, 64%, 65%, 66%, 67%, 68%, 69%, 70%, 71%, 72%, 73% 74%, 75%, 76%, 77%, 78%, 79%, 80%, 81%, 82%, 83%, 84%, 85%, 86%, 87%, 88%, 89%, 90%, 91%, 92%, 93%, 94%, 95%, 96%, 97%, 98%, 99%, 100%, 110%, 120%, 130%, 140%, 150%, 160%, 170%, 180%, 190%, 200%, or more or any percentage therebetween higher than off-target enzymatic activity of the variant Cas12i2 polypeptide, as compared to a parent polypeptide.

[0600] In some embodiments, enzymatic activity of the variant Cas12i2 polypeptide (e.g., the variant Cas12i2 polypeptide of any one of SEQ ID NOs: 3-146 and 495-512 comprising one or more substitutions listed in Table 4 and/or Table 5 and/or Table 6 and/or Table 7 and/or Table 8 and/or Table 9 and/or Table 10 and/or Table 11 and/or Table 12) at an off-target locus is no more than 10% (e.g., 10%, 9%, 8%, 7%, 6%, 5%, 4%, 3%, 2%, 1%, or 0%) of the enzymatic activity at the on-target locus. In some embodiments, enzymatic activity of the variant Cas12i2 polypeptide (e.g., the variant Cas12i2 polypeptide of any one of SEQ ID NOs: 3-146 and 495-512 comprising one or more substitutions listed in Table 4 and/or Table 5 and/or Table 6 and/or Table 7 and/or Table 8 and/or Table 9 and/or Table 10 and/or Table 11) at an off-target locus is no more than 5% (e.g., 5%, 4%, 3%, 2%, 1%, or 0%) of the enzymatic activity at the on-target locus. By comparison, enzymatic activity of SpCas9 at an off-target locus is up to 95% (e.g., 95%, 94%, 93%, 92%, 91%, 90%, 89%, 88%, 87%, 86%, 85%, 84%, 83%, 82%, 81%, 80%, 79%, 78%, 77%, 76%, 75%, 74%, 73%, 72%, 71%, 70%, 69%, 68%, 67%, 66%, 65%, 64%, 63%, 62%, 61%, 60%, 59%, 58%, 57%, 56%, 55%, 54%, 53%, 52%, 51%, 50%, 49%, 48%, 47%, 46%, 45%, 44%, 43%, 42%, 41%, 40%, 39%, 38%, 37%, 36%, 35%, 34%, 33%, 32%, 31%, 30%, 29%, 28%, 27%, 26%, 25%, 24%, 23%, 22%, 21%, 20%, 19%, 18%, 17%, 16%, 15%, 14%, 13%, 12%, 11%, 10%, 9%, 8%, 7%, 6%, 5%, 4%, 3%, 2%, 1%, or 0%) of the enzymatic activity at the on-target locus. See Example 16.

[0601] In some embodiments, editing efficiency of the variant Cas12i2 polypeptide (e.g., the variant Cas12i2 polypeptide of any one of SEQ ID NOs: 3-146 and 495-512 comprising one or more substitutions listed in Table 4 and/or Table 5 and/or Table 6 and/or Table 7 and/or Table 8 and/or Table 9 and/or Table 10 and/or Table 11 and/or Table 12) at an off-target locus is no more than 10% (e.g., 10%, 9%, 8%, 7%, 6%, 5%, 4%, 3%, 2%, 1%, or 0%) of the editing efficiency at the on-target locus. In some embodiments, editing efficiency of the variant Cas12i2 polypeptide (e.g., the variant Cas12i2 polypeptide of any one of SEQ ID NOs: 3-146 and 495-512 comprising one or more substitutions listed in Table 4 and/or Table 5 and/or Table 6 and/or Table 7 and/or Table 8 and/or Table 9 and/or Table 10 and/or Table 11) at an off-target locus is no more than 5% (e.g., 5%, 4%, 3%, 2%, 1%, or 0%) of the editing efficiency at the on-target locus. By comparison, editing efficiency of SpCas9 at an off-target locus is up to 95% (e.g., 95%, 94%, 93%, 92%, 91%, 90%, 89%, 88%, 87%, 86%, 85%, 84%, 83%, 82%, 81%, 80%, 79%, 78%, 77%, 76%, 75%, 74%, 73%, 72%, 71%, 70%, 69%, 68%, 67%, 66%, 65%, 64%, 63%, 62%, 61%, 60%, 59%, 58%, 57%, 56%, 55%, 54%, 53%, 52%, 51%, 50%, 49%, 48%, 47%, 46%, 45%, 44%, 43%, 42%, 41%, 40%, 39%, 38%, 37%, 36%, 35%, 34%, 33%, 32%, 31%, 30%, 29%, 28%, 27%, 26%, 25%, 24%, 23%, 22%, 21%, 20%, 19%, 18%, 17%, 16%, 15%, 14%, 13%, 12%, 11%, 10%, 9%, 8%, 7%, 6%, 5%, 4%, 3%, 2%, 1%, or 0%) of the editing efficiency at the on-target locus. See Example 16.

[0602] In some embodiments, editing by the variant Cas12i2 polypeptide (e.g., the variant Cas12i2 polypeptide of any one of SEQ ID NOs: 3-146 and 495-512 comprising one or more substitutions listed in Table 4 and/or Table 5 and/or Table 6 and/or Table 7 and/or Table 8 and/or Table 9 and/or Table 10 and/or Table 11 and/or Table 12) at an off-target locus is no more than 10% (e.g., 10%, 9%, 8%, 7%, 6%, 5%, 4%, 3%, 2%, 1%, or 0%) of the editing at the on-target locus. In some embodiments, editing by the variant Cas12i2 polypeptide (e.g., the variant Cas12i2 polypeptide of any one of SEQ ID NOs: 3-146 and 495-512 comprising one or more substitutions listed in Table 4 and/or Table 5 and/or Table 6 and/or Table 7 and/or Table 8 and/or Table 9 and/or Table 10 and/or Table 11) at an off-target locus is no more than 5% (e.g., 5%, 4%, 3%, 2%, 1%, or 0%) of the editing at the on-target locus. By comparison, editing of SpCas9 at an off-target locus is up to 95% (e.g., 95%, 94%, 93%, 92%, 91%, 90%, 89%, 88%, 87%, 86%, 85%, 84%, 83%, 82%, 81%, 80%, 79%, 78%, 77%, 76%, 75%, 74%, 73%, 72%, 71%, 70%, 69%, 68%, 67%, 66%, 65%, 64%, 63%, 62%, 61%, 60%, 59%, 58%, 57%, 56%, 55%, 54%, 53%, 52%, 51%, 50%, 49%, 48%, 47%, 46%, 45%, 44%, 43%, 42%, 41%, 40%, 39%, 38%, 37%, 36%, 35%, 34%, 33%, 32%, 31%, 30%, 29%, 28%, 27%, 26%, 25%, 24%, 23%, 22%, 21%, 20%, 19%, 18%, 17%, 16%, 15%, 14%, 13%, 12%, 11%, 10%, 9%, 8%, 7%, 6%, 5%, 4%, 3%, 2%, 1%, or 0%) of the editing at the on-target locus. See Example 16.

### Targeting Moiety

[0603] In some embodiments, a composition or complex as described herein comprises a targeting moiety (e.g., an RNA guide, antisense, oligonucleotides, peptide oligonucleotide conjugates) that binds the target nucleic acid and interacts with the variant Cas12i2 polypeptide. The targeting moiety may bind a target nucleic acid (e.g., with specific binding affinity to the target nucleic acid). In some embodiments, a composition described herein comprises two or more targeting moieties, e.g., two or more RNA guides (e.g., 2, 3, 4, 5, 6, 7, 8, 9, or more).

[0604] In some embodiments, the targeting moiety comprises, or is, an RNA guide. In some embodiments, the RNA guide directs the variant Cas12i2 polypeptide described herein to a particular nucleic acid sequence. Those skilled in the art reading the below examples of particular kinds of RNA guides will understand that, in some embodiments, an RNA guide is site-specific. That is, in some embodiments, an RNA guide associates specifically with one or more target nucleic acid sequences (e.g., specific DNA or genomic DNA sequences) and not to non-targeted nucleic acid sequences (e.g., non-specific DNA or random sequences). In the case of two or more guides within a composition, the two or more guides may target two or more separate variant Cas12i2 polypeptides (e.g., variant Cas12i2 polypeptides having the same or different sequence) as described herein to two or more (e.g., 2, 3, 4, 5, 6, 7, 8, 9, or more) target nucleic acids or two or more (e.g., 2, 3, 4, 5, 6, 7, 8, 9, or more) target loci of a target nucleic acid.

[0605] In some embodiments, the composition as described herein comprises an RNA guide that associates with the variant Cas12i2 polypeptide described herein and directs the variant Cas12i2 polypeptide to a target nucleic acid sequence (e.g., DNA).

[0606] The RNA guide may target (e.g., associate with, be directed to, contact, or bind) one or more nucleotides of a target sequence, e.g., a site-specific sequence or a site-specific target. In some embodiments, the variant effector nucleoprotein (e.g., variant Cas12i2 polypeptide plus an RNA guide) is activated upon binding to a target nucleic acid that is complementary to a DNA-targeting sequence in the RNA guide (e.g., a sequence-specific substrate or target nucleic acid).

[0607] In some embodiments, an RNA guide comprises a spacer having a length of from about 7 nucleotides to about 100 nucleotides. For example, the DNA-targeting segment can have a length of from about 7 nucleotides to about 80 nucleotides, from about 7 nucleotides to about 50 nucleotides, from about 7 nucleotides to about 40 nucleotides, from about 7 nucleotides to about 30 nucleotides, from about 7 nucleotides to about 25 nucleotides, from about 7 nucleotides to about 20 nucleotides, or from about 7 nucleotides to about 19 nucleotides. For example, the spacer can have a length of from about 7 nucleotides to about 20 nucleotides, from about 7 nucleotides to about 25 nucleotides, from about 7 nucleotides to about 30 nucleotides, from about 7 nucleotides to about 35 nucleotides, from about 7 nucleotides to about 40 nucleotides, from about 7 nucleotides to about 45 nucleotides, from about 7 nucleotides to about 50 nucleotides, from about 7 nucleotides to about 60 nucleotides, from about 7 nucleotides to about 70 nucleotides, from about 7 nucleotides to about 80 nucleotides, from about 7 nucleotides to about 90 nucleotides, from about 7 nucleotides to about 100 nucleotides, from about 10 nucleotides to about 25 nucleotides, from about 10 nucleotides to about 30 nucleotides, from about 10 nucleotides to about 35 nucleotides, from about 10 nucleotides to about 40 nucleotides, from about 10 nucleotides to about 45 nucleotides, from about 10 nucleotides to about 50 nucleotides, from about 10 nucleotides to about 60 nucleotides, from about 10 nucleotides to about 70 nucleotides, from about 10 nucleotides to about 80 nucleotides, from about 10 nucleotides to about 90 nucleotides, or from about 10 nucleotides to about 100 nucleotides.

[0608] In some embodiments, the spacer of the RNA guide may be generally designed to have a length of between 7 and 50 nucleotides or between 7 and 30 nucleotides (e.g., 7, 8, 9, 10, 11, 12, 13, 14, 15, 16, 17, 18, 19, 20, 21, 22, 23, 24, 25, 26, 27, 28, 29, 30, 31, 32, 33, 34, 35, 36, 37, 38, 39, 40, 41, 42, 43, 44, 45, 46, 47, 48, 49 or 50 nucleotides) and be complementary to a specific target nucleic acid sequence. In some particular embodiments, the RNA guide may be designed to be complementary to a specific DNA strand, e.g., of a genomic locus. In some embodiments, the DNA targeting sequence is designed to be complementary to a specific DNA strand, e.g., of a genomic locus.

[0609] The RNA guide may be substantially identical to a complementary strand of a reference nucleic acid sequence. In some embodiments, the RNA guide comprises a sequence having least about 60%, at least about 65%, at least about 70%, at least about 75%, at least about 80%, at least about 85%, at least about 90%, at least about 91%, at least about 92%, at least about 93%, at least about 94%, at least about 95%, at least about 96%, at least about 97%, at least about 98%, at least about 99%, or at least about 99.5% sequence identity to a complementary strand of a reference nucleic acid sequence, e.g., target nucleic acid. The percent identity between two such nucleic acids can be determined manually by inspection of the two optimally aligned nucleic acid sequences or by using software programs or algorithms (e.g., BLAST, ALIGN, CLUSTAL) using standard parameters.

[0610] In some embodiments, the RNA guide has at least about 60%, at least about 65%, at least about 70%, at least about 75%, at least about 80%, at least about 85%, at least about 90%, at least about 91%, at least about 92%, at least about 93%, at least about 94%, at least about 95%, at least about 96%, at least about 97%, at least about 98%, at least about 99%, or at least about 99.5% sequence identity to a complementary strand of a target nucleic acid.

[0611] In some embodiments, the RNA guide comprises a spacer that is a length of between 7 and 50 nucleotides (e.g., 7, 8, 9, 10, 11, 12, 13, 14, 15, 16, 17, 18, 19, 20, 21, 22, 23, 24, 25, 26, 27, 28, 29, 30, 31, 32, 33, 34, 35, 36, 37, 38, 39, 40, 41, 42, 43, 44, 45, 46, 47, 48, 49 or 50 nucleotides) and at least 80%, at least 90%, at least 95%, at least 96%, at least 97%, at least 98%, at least 99% complementary to a target nucleic acid. In some embodiments, the RNA guide comprises a sequence at least 80%, at least 90%, at least 95%, at least 96%, at least 97%, at least 98%, at least 99% complementary to a target DNA sequence. In some embodiments, the RNA guide comprises a sequence at least 80%, at least 90%, at least 95%, at least 96%, at least 97%, at least 98%, at least 99% complementary to a target genomic sequence. In some embodiments, the RNA guide comprises a sequence, e.g., RNA sequence, that is a length of up to 50 and at least 80%, at least 90%, at least 95%, at least 96%, at least 97%, at least 98%, at least 99% complementary to a target nucleic acid. In some embodiments, the RNA guide comprises a sequence at least 80%, at least 90%, at least 95%, at least 96%, at least 97%, at least 98%, at least 99% complementary to a target DNA sequence. In some embodiments, the RNA guide comprises a sequence at least 80%, at least 90%, at least 95%, at least 96%, at least 97%, at least 98%, at least 99% complementary to a target genomic sequence.

[0612] In certain embodiments, the RNA guide includes, consists essentially of, or comprises a direct repeat sequence linked to a DNA targeting sequence. In some embodiments, the RNA guide includes a direct repeat sequence and a DNA targeting sequence or a direct repeat-DNA targeting sequence-direct repeat sequence. In some embodiments, the RNA guide includes a truncated direct repeat sequence and a DNA targeting sequence, which is typical of processed or mature crRNA. In some embodiments, the variant Cas12i2 polypeptide described herein forms a complex with the RNA guide, and the RNA guide directs the complex to associate with site-specific target nucleic acid that is complementary to at least a portion of the RNA guide.

[0613] In some embodiments, the direct repeat sequence is at least 90% identical to a sequence of Table 13 or a portion of a sequence of Table 13. In some embodiments, the direct repeat sequence is at least 95% identical to a sequence of Table 13 or a portion of a sequence of Table 13. In some embodiments, the direct repeat sequence is a sequence of Table 13 or a portion of a sequence of Table 13.

[0614] In some embodiments, the direct repeat sequence of SEQ ID NO: 492 is a mature (e.g., processed) direct repeat sequence. In some embodiments, a crRNA (e.g., mature crRNA) comprises the direct repeat of SEQ ID NO: 492 and a spacer. In some embodiments, the direct repeat sequences of SEQ ID NOs: 493 and 494 are unprocessed direct repeat sequences. In some embodiments, a crRNA (e.g., pre-crRNA) comprises a first direct repeat of SEQ ID NO: 493, a spacer, and a second direct repeat sequence of SEQ ID NO: 493 (e.g., the two direct repeat sequences flank the spacer). In some embodiments, a crRNA (e.g., pre-crRNA) comprises a first direct repeat of SEQ ID NO: 494, a spacer, and a second direct repeat sequence of SEQ ID NO: 494 (e.g., the two direct repeat sequences flank the spacer).

TABLE 13
Direct repeat sequences.

| Sequence | |
|---|---|
| identifier | Direct Repeat Sequence |
| SEQ ID NO: 493 | GUUGCAAAACCCAAGAAAUCCGUCU |
| | UUCAUUGACGG |
| SEQ ID NO: 494 | GCAACACCUAAGAAAUCCGUCUUUC |
| | AUUGACGGG |
| SEQ ID NO: 492 | AGAAAUCCGUCUUUCAUUGACGG |

[0615] In some embodiments, PAMs corresponding to variant Cas12i2 polypeptide of the present invention include 5′-NTTN-3′, wherein N is any nucleotide. In some embodiments, the PAM comprises the 5′-TTH-3′, 5′-TTY-3′, or 5′-TTC-3, wherein N is any nucleotide, H is A, C, or T and Y is C or T. In some embodiments, the PAM comprises 5′-NTTY-3′, 5′-NTTC-3′, 5′-NTTT-3′, 5′-NTTA-3′, 5′-NTTB-3′, 5′-NTTG-3′, 5′-CTTY-3′, 5‘-DTTR’3′, 5′-CTTR-3′, 5′-DTTT-3′, 5′-ATTN-3′, or 5′-GTTN-3, wherein B is any nucleotide except for A, D is any nucleotide except for C, and R is A or G. In some embodiments, the PAM comprises 5′-CTTT-3′, 5′-CTTC-3′, 5′-GTTT-3′, 5′-GTTC-3′, 5′-TTTC-3′, 5′-GTTA-3′, or 5′-GTTG-3′.

[0616] In some embodiments, the composition or complex described herein includes one or more (e.g., two, three, four, five, six, seven, eight, or more) RNA guides, e.g., a plurality of RNA guides.

[0617] In some embodiments, the RNA guide has an architecture similar to, for example International Publication Nos. WO 2014/093622 and WO 2015/070083, the entire contents of each of which are incorporated herein by reference.

### Modifications

[0618] The RNA guide or any of the nucleic acid sequences encoding the variant Cas12i2 polypeptides may include one or more covalent modifications with respect to a reference sequence, in particular the parent polyribonucleotide, which are included within the scope of this invention.

[0619] Exemplary modifications can include any modification to the sugar, the nucleobase, the internucleoside linkage (e.g. to a linking phosphate/to a phosphodiester linkage/to the phosphodiester backbone), and any combination thereof. Some of the exemplary modifications provided herein are described in detail below.

[0620] The RNA guide or any of the nucleic acid sequences encoding components of the variant Cas12i2 polypeptides may include any useful modification, such as to the sugar, the nucleobase, or the internucleoside linkage (e.g. to a linking phosphate/to a phosphodiester linkage/to the phosphodiester backbone). One or more atoms of a pyrimidine nucleobase may be replaced or substituted with optionally substituted amino, optionally substituted thiol, optionally substituted alkyl (e.g., methyl or ethyl), or halo (e.g., chloro or fluoro). In certain embodiments, modifications (e.g., one or more modifications) are present in each of the sugar and the internucleoside linkage. Modifications may be modifications of ribonucleic acids (RNAs) to deoxyribonucleic acids (DNAs), threose nucleic acids (TNAs), glycol nucleic acids (GNAs), peptide nucleic acids (PNAs), locked nucleic acids (LNAs) or hybrids thereof). Additional modifications are described herein.

[0621] In some embodiments, the modification may include a chemical or cellular induced modification. For example, some nonlimiting examples of intracellular RNA modifications are described by Lewis and Pan in “RNA modifications and structures cooperate to guide RNA-protein interactions” from Nat Reviews Mol Cell Biol, 2017, 18:202-210.

[0622] Different sugar modifications, nucleotide modifications, and/or internucleoside linkages (e.g., backbone structures) may exist at various positions in the sequence. One of ordinary skill in the art will appreciate that the nucleotide analogs or other modification(s) may be located at any position(s) of the sequence, such that the function of the sequence is not substantially decreased. The sequence may include from about 1% to about 100% modified nucleotides (either in relation to overall nucleotide content, or in relation to one or more types of nucleotide, i.e. any one or more of A, G, U or C) or any intervening percentage (e.g., from 1% to 20%>, from 1% to 25%, from 1% to 50%, from 1% to 60%, from 1% to 70%, from 1% to 80%, from 1% to 90%, from 1% to 95%, from 10% to 20%, from 10% to 25%, from 10% to 50%, from 10% to 60%, from 10% to 70%, from 10% to 80%, from 10% to 90%, from 10% to 95%, from 10% to 100%, from 20% to 25%, from 20% to 50%, from 20% to 60%, from 20% to 70%, from 20% to 80%, from 20% to 90%, from 20% to 95%, from 20% to 100%, from 50% to 60%, from 50% to 70%, from 50% to 80%, from 50% to 90%, from 50% to 95%, from 50% to 100%, from 70% to 80%, from 70% to 90%, from 70% to 95%, from 70% to 100%, from 80% to 90%, from 80% to 95%, from 80% to 100%, from 90% to 95%, from 90% to 100%, and from 95% to 100%).

[0623] In some embodiments, sugar modifications (e.g., at the 2′ position or 4′ position) or replacement of the sugar at one or more ribonucleotides of the sequence may, as well as backbone modifications, include modification or replacement of the phosphodiester linkages. Specific examples of a sequence include, but are not limited to, sequences including modified backbones or no natural internucleoside linkages such as internucleoside modifications, including modification or replacement of the phosphodiester linkages. Sequences having modified backbones include, among others, those that do not have a phosphorus atom in the backbone. For the purposes of this application, and as sometimes referenced in the art, modified RNAs that do not have a phosphorus atom in their internucleoside backbone can also be considered to be oligonucleosides. In particular embodiments, a sequence will include ribonucleotides with a phosphorus atom in its internucleoside backbone.

[0624] Modified sequence backbones may include, for example, phosphorothioates, chiral phosphorothioates, phosphorodithioates, phosphotriesters, aminoalkylphosphotriesters, methyl and other alkyl phosphonates such as 3′-alkylene phosphonates and chiral phosphonates, phosphinates, phosphoramidates such as 3′-amino phosphoramidate and aminoalkylphosphoramidates, thionophosphoramidates, thionoalkylphosphonates, thionoalkylphosphotriesters, and boranophosphates having normal 3′-5′ linkages, 2′-5′ linked analogs of these, and those having inverted polarity wherein the adjacent pairs of nucleoside units are linked 3′-5′ to 5′-3′ or 2′-5′ to 5′-2′. Various salts, mixed salts and free acid forms are also included. In some embodiments, the sequence may be negatively or positively charged.

[0625] The modified nucleotides, which may be incorporated into the sequence, can be modified on the internucleoside linkage (e.g., phosphate backbone). Herein, in the context of the polynucleotide backbone, the phrases “phosphate” and “phosphodiester” are used interchangeably. Backbone phosphate groups can be modified by replacing one or more of the oxygen atoms with a different substituent. Further, the modified nucleosides and nucleotides can include the wholesale replacement of an unmodified phosphate moiety with another internucleoside linkage as described herein. Examples of modified phosphate groups include, but are not limited to, phosphorothioate, phosphoroselenates, boranophosphates, boranophosphate esters, hydrogen phosphonates, phosphoramidates, phosphorodiamidates, alkyl or aryl phosphonates, and phosphotriesters. Phosphorodithioates have both non-linking oxygens replaced by sulfur. The phosphate linker can also be modified by the replacement of a linking oxygen with nitrogen (bridged phosphoramidates), sulfur (bridged phosphorothioates), and carbon (bridged methylene-phosphonates).

[0626] The α-thio substituted phosphate moiety is provided to confer stability to RNA and DNA polymers through the unnatural phosphorothioate backbone linkages. Phosphorothioate DNA and RNA have increased nuclease resistance and subsequently a longer half-life in a cellular environment.

[0627] In specific embodiments, a modified nucleoside includes an alpha-thio-nucleoside (e.g., 5′-O-(1-thiophosphate)-adenosine, 5′-O-(1-thiophosphate)-cytidine (a-thio-cytidine), 5′-O-(1-thiophosphate)-guanosine, 5′-O-(1-thiophosphate)-uridine, or 5′-O-(1-thiophosphate)-pseudouridine).

[0628] Other internucleoside linkages that may be employed according to the present invention, including internucleoside linkages which do not contain a phosphorous atom, are described herein.

[0629] In some embodiments, the sequence may include one or more cytotoxic nucleosides. For example, cytotoxic nucleosides may be incorporated into sequence, such as bifunctional modification. Cytotoxic nucleoside may include, but are not limited to, adenosine arabinoside, 5-azacytidine, 4′-thio-aracytidine, cyclopentenylcytosine, cladribine, clofarabine, cytarabine, cytosine arabinoside, 1-(2-C-cyano-2-deoxy-beta-D-arabino-pentofuranosyl)-cytosine, decitabine, 5-fluorouracil, fludarabine, floxuridine, gemcitabine, a combination of tegafur and uracil, tegafur ((RS)-5-fluoro-1-(tetrahydrofuran-2-yl)pyrimidine-2,4(1H,3H)-dione), troxacitabine, tezacitabine, 2′-deoxy-2′-methylidenecytidine (DMDC), and 6-mercaptopurine. Additional examples include fludarabine phosphate, N4-behenoyl-1-beta-D-arabinofuranosylcytosine, N4-octadecyl-1-beta-D-arabinofuranosylcytosine, N4-palmitoyl-1-(2-C-cyano-2-deoxy-beta-D-arabino-pentofuranosyl) cytosine, and P-4055 (cytarabine 5′-elaidic acid ester).

[0630] In some embodiments, the sequence includes one or more post-transcriptional modifications (e.g., capping, cleavage, polyadenylation, splicing, poly-A sequence, methylation, acylation, phosphorylation, methylation of lysine and arginine residues, acetylation, and nitrosylation of thiol groups and tyrosine residues, etc.). The one or more post-transcriptional modifications can be any post-transcriptional modification, such as any of the more than one hundred different nucleoside modifications that have been identified in RNA (Rozenski, J, Crain, P, and McCloskey, J. (1999). The RNA Modification Database: 1999 update. Nucl Acids Res 27: 196-197) In some embodiments, the first isolated nucleic acid comprises messenger RNA (mRNA). In some embodiments, the mRNA comprises at least one nucleoside selected from the group consisting of pyridin-4-one ribonucleoside, 5-aza-uridine, 2-thio-5-aza-uridine, 2-thiouridine, 4-thio-pseudouridine, 2-thio-pseudouridine, 5-hydroxyuridine, 3-methyluridine, 5-carboxymethyl-uridine, 1-carboxymethyl-pseudouridine, 5-propynyl-uridine, 1-propynyl-pseudouridine, 5-taurinomethyluridine, 1-taurinomethyl-pseudouridine, 5-taurinomethyl-2-thio-uridine, 1-taurinomethyl-4-thio-uridine, 5-methyl-uridine, 1-methyl-pseudouridine, 4-thio-1-methyl-pseudouridine, 2-thio-1-methyl-pseudouridine, 1-methyl-1-deaza-pseudouridine, 2-thio-1-methyl-1-deaza-pseudouridine, dihydrouridine, dihydropseudouridine, 2-thio-dihydrouridine, 2-thio-dihydropseudouridine, 2-methoxyuridine, 2-methoxy-4-thio-uridine, 4-methoxy-pseudouridine, and 4-methoxy-2-thio-pseudouridine. In some embodiments, the mRNA comprises at least one nucleoside selected from the group consisting of 5-aza-cytidine, pseudoisocytidine, 3-methyl-cytidine, N4-acetylcytidine, 5-formylcytidine, N4-methylcytidine, 5-hydroxymethylcytidine, 1-methyl-pseudoisocytidine, pyrrolo-cytidine, pyrrolo-pseudoisocytidine, 2-thio-cytidine, 2-thio-5-methyl-cytidine, 4-thio-pseudoisocytidine, 4-thio-1-methyl-pseudoisocytidine, 4-thio-1-methyl-1-deaza-pseudoisocytidine, 1-methyl-1-deaza-pseudoisocytidine, zebularine, 5-aza-zebularine, 5-methyl-zebularine, 5-aza-2-thio-zebularine, 2-thio-zebularine, 2-methoxy-cytidine, 2-methoxy-5-methyl-cytidine, 4-methoxy-pseudoisocytidine, and 4-methoxy-1-methyl-pseudoisocytidine. In some embodiments, the mRNA comprises at least one nucleoside selected from the group consisting of 2-aminopurine, 2, 6-diaminopurine, 7-deaza-adenine, 7-deaza-8-aza-adenine, 7-deaza-2-aminopurine, 7-deaza-8-aza-2-aminopurine, 7-deaza-2,6-diaminopurine, 7-deaza-8-aza-2,6-diaminopurine, 1-methyladenosine, N6-methyladenosine, N6-isopentenyladenosine, N6-(cis-hydroxyisopentenyl)adenosine, 2-methylthio-N6-(cis-hydroxyisopentenyl) adenosine, N6-glycinylcarbamoyladenosine, N6-threonylcarbamoyladenosine, 2-methylthio-N6-threonyl carbamoyladenosine, N6,N6-dimethyladenosine, 7-methyladenine, 2-methylthio-adenine, and 2-methoxy-adenine. In some embodiments, mRNA comprises at least one nucleoside selected from the group consisting of inosine, 1-methyl-inosine, wyosine, wybutosine, 7-deaza-guanosine, 7-deaza-8-aza-guanosine, 6-thio-guanosine, 6-thio-7-deaza-guanosine, 6-thio-7-deaza-8-aza-guanosine, 7-methyl-guanosine, 6-thio-7-methyl-guanosine, 7-methylinosine, 6-methoxy-guanosine, 1-methylguanosine, N2-methylguanosine, N2,N2-dimethylguanosine, 8-oxo-guanosine, 7-methyl-8-oxo-guanosine, 1-methyl-6-thio-guanosine, N2-methyl-6-thio-guanosine, and N2,N2-dimethyl-6-thio-guanosine.

[0631] The sequence may or may not be uniformly modified along the entire length of the molecule. For example, one or more or all types of nucleotide (e.g., naturally-occurring nucleotides, purine or pyrimidine, or any one or more or all of A, G, U, C, I, pU) may or may not be uniformly modified in the sequence, or in a given predetermined sequence region thereof. In some embodiments, the sequence includes a pseudouridine. In some embodiments, the sequence includes an inosine, which may aid in the immune system characterizing the sequence as endogenous versus viral RNAs. The incorporation of inosine may also mediate improved RNA stability/reduced degradation. See for example, Yu, Z. et al. (2015) RNA editing by ADAR1 marks dsRNA as “self”. Cell Res. 25, 1283-1284, which is incorporated by reference in its entirety.

### Target Nucleic Acid

[0632] The methods disclosed herein are applicable for a variety of target nucleic acids. In some embodiments, the target nucleic acid is a DNA, such as a DNA locus. In some embodiments, the target nucleic acid is in a nucleus of a cell. In some embodiments, the target nucleic acid is a genomic DNA locus. In some embodiments, the target nucleic acid is single-stranded (e.g., single-stranded DNA). In some embodiments, the target nucleic acid is double-stranded (e.g., double-stranded DNA). In some embodiments, the target nucleic acid comprises both single-stranded and double-stranded regions. In some embodiments, the target nucleic acid is linear. In some embodiments, the target nucleic acid is circular. In some embodiments, the target nucleic acid comprises one or more modified nucleotides, such as methylated nucleotides, damaged nucleotides, or nucleotides analogs. In some embodiments, the target nucleic acid is not modified.

[0633] In some embodiments, the composition described herein includes one or more (e.g., two, three, four, five, six, seven, eight, or more) target nucleic acids, e.g., a plurality of target nucleic acids. In some embodiments, the composition described herein includes one or more (e.g., two, three, four, five, six, seven, eight, or more) target loci of a target nucleic acid, e.g., a plurality of target loci.

[0634] The target nucleic acid may be of any length, such as about at least any one of 10 bp, 20 bp, 30 bp, 40 bp, 50 bp, 60 bp, 70 bp, 80 bp, 90 bp, 100 bp, 200 bp, 500 bp, 1000 bp, 2000 bp, 5000 bp, 10 kb, 20 kb, 50 kb, 100 kb, 200 kb, 500 kb, 1 Mb, or longer or any length inbetween. The target nucleic acid may also comprise any sequence. In some embodiments, the target nucleic acid is GC-rich, such as having at least about any one of 40%, 45%, 50%, 55%, 60%, 65%, or higher GC content. In some embodiments, the target nucleic acid has a GC content of at least about 70%, 80%, or more. In some embodiments, the target nucleic acid is a GC-rich fragment in a non-GC-rich target nucleic acid. In some embodiments, the target nucleic acid is not GC-rich. In some embodiments, the target nucleic acid has one or more secondary structures or higher-order structures. In some embodiments, the target nucleic acid is not in a condensed state, such as in a chromatin, to render the target nucleic acid inaccessible by the variant Cas12i2 polypeptide/RNA guide complex.

[0635] In some embodiments, the target nucleic acid is present in a cell. In some embodiments, the target nucleic acid is present in the nucleus of the cell. In some embodiments, the target nucleic acid is endogenous to the cell. In some embodiments, the target nucleic acid is a genomic DNA. In some embodiments, the target nucleic acid is a chromosomal DNA. In some embodiments, the target nucleic acid is a protein-coding gene or a functional region thereof, such as a coding region, or a regulatory element, such as a promoter, enhancer, a 5′ or 3′ untranslated region, etc. In some embodiments, the target nucleic acid is a non-coding gene, such as transposon, miRNA, tRNA, ribosomal RNA, ribozyme, or lincRNA. In some embodiments, the target nucleic acid is a plasmid.

[0636] In some embodiments, the target nucleic acid is exogenous to a cell. In some embodiments, the target nucleic acid is a viral nucleic acid, such as viral DNA or viral RNA. In some embodiments, the target nucleic acid is a horizontally transferred plasmid. In some embodiments, the target nucleic acid is integrated in the genome of the cell. In some embodiments, the target nucleic acid is not integrated in the genome of the cell. In some embodiments, the target nucleic acid is a plasmid in the cell. In some embodiments, the target nucleic acid is present in an extrachromosomal array.

[0637] In some embodiments, the target nucleic acid is an isolated nucleic acid, such as an isolated DNA or an isolated RNA. In some embodiments, the target nucleic acid is present in a cell-free environment. In some embodiments, the target nucleic acid is an isolated vector, such as a plasmid. In some embodiments, the target nucleic acid is an ultrapure plasmid.

[0638] In some embodiments, a target sample may include a segment of the target nucleic acid that hybridizes to at least a portion of the targeting moiety (e.g., RNA guide). In some embodiments, the target sample has only one copy of the target nucleic acid. In some embodiments, the target sample has more than one copy, such as at least about any one of 2, 3, 4, 5, 10, 100, or more copies of the target nucleic acid. For example, a target sample comprising a repeated sequence (e.g., target nucleic acid sequence) in a genome of a virus or a bacterium and the repeated sequence may be targeted by at least a portion of the targeting moiety.

[0639] In some embodiments, the target nucleic acid is present in a readily accessible region of the nucleic acid. In some embodiments, the target nucleic acid is in an exon of a gene. In some embodiments, the target nucleic acid is across an exon-intron junction of a gene. In some embodiments, the target nucleic acid is present in a non-coding region, such as a regulatory region of a gene. In some embodiments, wherein the target nucleic acid is exogenous to a cell, the target nucleic acid comprises a sequence that is not found in the genome of the cell.

[0640] Suitable DNA/RNA binding conditions include physiological conditions normally present in a cell. Other suitable DNA/RNA binding conditions (e.g., conditions in a cell-free system) are known in the art; see, e.g., Sambrook, supra. The strand of the target nucleic acid that is complementary to and hybridizes with the targeting moiety (e.g., RNA guide) is referred to as the “complementary strand” and the strand of the target nucleic acid that is complementary to the “complementary strand” (and is therefore not complementary to the RNA guide) is referred to as the “noncomplementary strand” or “non-complementary strand”.

### Binary Complex

[0641] In some aspects, a Cas12i2 polypeptide and the targeting moiety form a complex. In some embodiments, a Cas12i2 polypeptide, e.g., a variant Cas12i2 polypeptide, and a targeting moiety, e.g., an RNA guide as described herein, form a complex (e.g., a binary complex, e.g., a ribonucleoprotein or RNP). In some embodiments, a Cas12i2 polypeptide and an RNA guide form a binary complex.

[0642] A binary complex described herein, in some embodiments, comprises a variant Cas12i2 polypeptide that associates with at least one RNA guide, wherein each RNA guide targets a target nucleic acid such as DNA. In some embodiments, the variant Cas12i2 polypeptide/RNA guide complex (e.g., variant binary complex) comprises enzymatic activity, such as nuclease activity, that may nick or cleave the target nucleic acid. The variant Cas12i2 polypeptide and the RNA guide, either alone or together, do not naturally occur. Complex formation between the variant Cas12i2 polypeptide and the RNA guide can enhance stability and/or protein-RNA interactions between the two, as compared to a parent polypeptide and RNA guide.

[0643] Generally, the variant Cas12i2 polypeptide and the targeting moiety (e.g., RNA guide) bind to each other in a molar ratio of about 1:1 to form the variant binary complex. Binding of the variant Cas12i2 polypeptide and the targeting moiety (e.g., RNA guide) to form the variant binary complex is referred to as loading the RNA guide to the polypeptide.

[0644] In some embodiments, the binary complex follows a one-guide rule, i.e., the variant Cas12i2 polypeptide does not dissociate from the bound RNA guide in the complex, or switch RNA guide with a free, unbound RNA. In some embodiments, the ternary complex follows a one-binary complex rule, i.e., the variant binary complex does not dissociate from the bound target nucleic acid (e.g., target DNA substrate) or switch the target nucleic acid with a free, unbound nucleic acid.

### Functionality of Binary Complexes

[0645] In some aspects, the variant binary complex comprises a variant Cas12i2 polypeptide with at least one alteration or mutation that enhances at least one of enzymatic activity, target nucleic acid complex formation, target nucleic acid binding activity, target nucleic acid affinity, target nucleic acid binding specificity, protein-nucleic acid interactions, ternary complex formation, on-target binding activity, on-target binding specificity, and/or stability.

[0646] In some aspects, the variant binary complex comprises a variant Cas12i2 polypeptide with at least one alteration or mutation and the variant binary complex has decreased at least one of off-target binding to a non-target nucleic acid, activity at a non-target locus of a target nucleic acid, binary complex dissociation, dissociation from the target nucleic acid.

[0647] In some aspects, a variant Cas12i2 polypeptide and a targeting moiety (e.g., RNA guide) form a variant binary complex, and the variant binary complex exhibits increased at least one of enzymatic activity, target nucleic acid complex formation, target nucleic acid binding activity, target nucleic acid affinity, target nucleic acid binding specificity, protein-nucleic acid interactions, ternary complex formation, on-target binding activity, on-target binding specificity, and/or stability, as compared to a parent binary complex.

[0648] In some embodiments, the variant binary complex comprises a variant Cas12i2 polypeptide with at least one alteration or mutation that increases at least one of enzymatic activity, target nucleic acid complex formation, target nucleic acid binding activity, target nucleic acid affinity, target nucleic acid binding specificity, protein-nucleic acid interactions, ternary complex formation, on-target binding activity, on-target binding specificity, and/or stability of the variant binary complex at least 1%, 2%, 3%, 4%, 5%, 6%, 7%, 8%, 9%, 10%, 11%, 12%, 13%, 14%, 15%, 16%, 17%, 18%, 19%, 20%, 25%, 30%, 35%, 40%, 45%, 50%, 55%, 60%, 65%, 70%, 75%, 80%, 85%, 90%, 95%, or 100% greater than the enzymatic activity, target nucleic acid complex formation, target nucleic acid binding activity, target nucleic acid affinity, target nucleic acid binding specificity, protein-nucleic acid interactions, ternary complex formation, on-target binding activity, on-target binding specificity, and/or stability of a parent binary complex.

[0649] In some embodiments, the variant binary complex exhibits enhanced at least one of enzymatic activity, target nucleic acid complex formation, target nucleic acid binding activity, target nucleic acid affinity, target nucleic acid binding specificity, protein-nucleic acid interactions, ternary complex formation, on-target binding activity, on-target binding specificity, and/or stability, as compared to a parent binary complex, at a temperature in the range of about 20° C. to about 65° C., e.g., about any one of 20° C., 21° C., 22° C., 23° C., 24° C., 25° C., 26° C., 27° C., 28° C., 29° C., 30° C., 31° C., 32° C., 33° C., 34° C., 35° C., 36° C., 37° C., 38° C., 39° C., 40° C., 41° C., 42° C., 43° C., 44° C., 45° C., 50° C., 51° C., 52° C., 53° C., 54° C., 55° C., 56° C., 57° C., 58° C., 59° C., 60° C. or 65° C.

[0650] In some embodiments, the variant binary complex exhibits enhanced at least one of enzymatic activity, target nucleic acid complex formation, target nucleic acid binding activity, target nucleic acid affinity, target nucleic acid binding specificity, protein-nucleic acid interactions, ternary complex formation, on-target binding activity, on-target binding specificity, and/or stability, as compared to a parent binary complex, in a buffer having a pH in a range of about 7.3 to about 8.6 (e.g., 7.3, 7.4, 7.5, 7.6, 7.7, 7.8, 7.9, 8.0, 8.1, 8.2, 8.3, 8.4, 8.5, 8.6, or any value within a range between any combination of these values).

[0651] In some embodiments, the variant binary complex exhibits enhanced at least one of enzymatic activity, target nucleic acid complex formation, target nucleic acid binding activity, target nucleic acid affinity, target nucleic acid binding specificity, protein-nucleic acid interactions, ternary complex formation, on-target binding activity, on-target binding specificity, and/or stability, as compared to a parent binary complex, when the Tₘ value of the variant binary complex is at least 1° C., 2° C., 3° C., 4° C., 5° C., 6° C., 7° C., 8° C., 9° C., 10° C., 11° C., 12° C., 13° C., 14° C., 15° C., 16° C., 17° C., 18° C., 19° C., or 20° C. greater than the Tₘ value of a parent binary complex. In one embodiment, the variant binary complex exhibits enhanced at least one of enzymatic activity, target nucleic acid complex formation, target nucleic acid binding activity, target nucleic acid affinity, target nucleic acid binding specificity, protein-nucleic acid interactions, ternary complex formation, on-target binding activity, on-target binding specificity, and/or stability when the Tₘ value of the variant binary complex is at least 8° C. greater than the Tₘ value of the parent binary complex.

[0652] In some embodiments, the variant binary complex exhibits increased at least one of enzymatic activity, target nucleic acid complex formation, target nucleic acid binding activity, target nucleic acid affinity, target nucleic acid binding specificity, protein-nucleic acid interactions, ternary complex formation, on-target binding activity, on-target binding specificity, and/or stability at about 37° C. over an incubation period of at least about any one of 10 mins, 15 mins, 20 mins, 25 mins, 30 mins, 35 mins, 40 mins, 45 mins, 50 mins, 55 mins, 1 hr, 2 hr, 3 hr, 4 hr, or more hours as compared to a parent binary complex. In some embodiments, a variant binary complex exhibits increased at least one of enzymatic activity, target nucleic acid complex formation, target nucleic acid binding activity, target nucleic acid affinity, target nucleic acid binding specificity, protein-nucleic acid interactions, ternary complex formation, on-target binding activity, on-target binding specificity, and/or stability over a range of incubation times as compared to a parent binary complex.

[0653] In some embodiments, the variant binary complex comprises a variant Cas12i2 polypeptide with at least one alteration or mutation that increases at least one of enzymatic activity, target nucleic acid complex formation, target nucleic acid binding activity, target nucleic acid affinity, target nucleic acid binding specificity, protein-nucleic acid interactions, ternary complex formation, on-target binding activity, on-target binding specificity, and/or stability of the variant binary complex and the variant binary complex comprises a variant Cas12i2 polypeptide comprising an amino acid sequence having at least about 60%, 65%, 70%, 75%, 80%, 85%, 90%, 91%, 92%, 93%, 94%, 95%, 96%, 97%, 98%, 99%, or 100% identity to SEQ ID NO: 4.

[0654] In some embodiments, the variant binary complex comprises enhanced at least one of enzymatic activity, target nucleic acid complex formation, target nucleic acid binding activity, target nucleic acid affinity, target nucleic acid binding specificity, protein-nucleic acid interactions, ternary complex formation, on-target binding activity, on-target binding specificity, and/or stability and the variant binary complex comprises a variant Cas12i2 polypeptide comprising an amino acid sequence having at least about 60%, 65%, 70%, 75%, 80%, 85%, 90%, 91%, 92%, 93%, 94%, 95%, 96%, 97%, 98%, 99%, or 100% identity to any one of SEQ ID NOs: 3-5, 495, or 496.

[0655] In some embodiments, the variant binary complex comprises enhanced at least one of enzymatic activity, target nucleic acid complex formation, target nucleic acid binding activity, target nucleic acid affinity, target nucleic acid binding specificity, protein-nucleic acid interactions, ternary complex formation, on-target binding activity, on-target binding specificity, and/or stability and the variant binary complex comprises a variant Cas12i2 polypeptide comprising an amino acid sequence having at least about 60%, 65%, 70%, 75%, 80%, 85%, 90%, 91%, 92%, 93%, 94%, 95%, 96%, 97%, 98%, 99%, or 100% identity to any one of SEQ ID NOs: 3-146 and 495-512.

[0656] In some aspects, a variant Cas12i2 polypeptide and a targeting moiety (e.g., RNA guide) form a variant binary complex, and the variant binary complex exhibits decreased at least one of off-target binding to a non-target nucleic acid, activity at a non-target locus of a target nucleic acid, binary complex dissociation, and/or dissociation from the target nucleic acid, as compared to a parent binary complex. In some embodiments, the variant binary complex exhibits decreased at least one of off-target binding to a non-target nucleic acid, activity at a non-target locus of a target nucleic acid, binary complex dissociation, and/or dissociation from the target nucleic acid may be at least 1%, 2%, 3%, 4%, 5%, 6%, 7%, 8%, 9%, 10%, 11%, 12%, 13%, 14%, 15%, 16%, 17%, 18%, 19%, 20%, 25%, 30%, 35%, 40%, 45%, 50%, 55%, 60%, 65%, 70%, 75%, 80%, 85%, 90%, 95%, or 100% less than the off-target binding to a non-target nucleic acid, activity at a non-target locus of a target nucleic acid, binary complex dissociation, and/or dissociation from the target nucleic acid of a parent binary complex.

[0657] In some embodiments, the variant binary complex exhibits decreased at least one of off-target binding to a non-target nucleic acid, activity at a non-target locus of a target nucleic acid, binary complex dissociation, and/or dissociation from the target nucleic acid at least 1%, 2%, 3%, 4%, 5%, 6%, 7%, 8%, 9%, 10%, 11%, 12%, 13%, 14%, 15%, 16%, 17%, 18%, 19%, 20%, 25%, 30%, 35%, 40%, 45%, 50%, 55%, 60%, 65%, 70%, 75%, 80%, 85%, 90%, 95%, or 100% less than the off-target binding to a non-target nucleic acid, activity at a non-target locus of a target nucleic acid, binary complex dissociation, and/or dissociation from the target nucleic acid of a parent binary complex.

[0658] In some embodiments, the variant binary complex exhibits decreased at least one of off-target binding to a non-target nucleic acid, activity at a non-target locus of a target nucleic acid, binary complex dissociation, and/or dissociation from the target nucleic acid, as compared to a parent binary complex, at a temperature in the range of about 20° C. to about 65° C., e.g., about any one of 20° C., 21° C., 22° C., 23° C., 24° C., 25° C., 26° C., 27° C., 28° C., 29° C., 30° C., 31° C., 32° C., 33° C., 34° C., 35° C., 36° C., 37° C., 38° C., 39° C., 40° C., 41° C., 42° C., 43° C., 44° C., 45° C., 50° C., 51° C., 52° C., 53° C., 54° C., 55° C., 56° C., 57° C., 58° C., 59° C., 60° C. or 65° C.

[0659] In some embodiments, the variant binary complex exhibits decreased at least one of off-target binding to a non-target nucleic acid, activity at a non-target locus of a target nucleic acid, binary complex dissociation, and/or dissociation from the target nucleic acid, as compared to a parent binary complex, in a buffer having a pH in a range of about 7.3 to about 8.6 (e.g., 7.3, 7.4, 7.5, 7.6, 7.7, 7.8, 7.9, 8.0, 8.1, 8.2, 8.3, 8.4, 8.5, 8.6, or any value within a range between any combination of these values).

[0660] In some embodiments, the variant binary complex exhibits decreased at least one of off-target binding to a non-target nucleic acid, activity at a non-target locus of a target nucleic acid, binary complex dissociation, and/or dissociation from the target nucleic acid, as compared to a parent binary complex, when the Tₘ value of the variant binary complex is at least 1° C., 2° C., 3° C., 4° C., 5° C., 6° C., 7° C., 8° C., 9° C., 10° C., 11° C., 12° C., 13° C., 14° C., 15° C., 16° C., 17° C., 18° C., 19° C., or 20° C. greater than the Tₘ value of a parent binary complex. In one embodiment, the variant binary complex exhibits at least one of decreased off-target binding to a non-target nucleic acid, activity at a non-target locus of a target nucleic acid, binary complex dissociation, and/or dissociation from the target nucleic acid when the Tₘ value of the variant binary complex is at least 8° C. greater than the Tₘ value of the parent binary complex.

[0661] In some embodiments, the variant binary complex comprises decreased at least one of off-target binding to a non-target nucleic acid, activity at a non-target locus of a target nucleic acid, binary complex dissociation, and/or dissociation from the target nucleic acid and the variant binary complex comprises a variant Cas12i2 polypeptide comprising an amino acid sequence having at least about 60%, 65%, 70%, 75%, 80%, 85%, 90%, 91%, 92%, 93%, 94%, 95%, 96%, 97%, 98%, 99%, or 100% identity to any one of SEQ ID NOs: 4.

[0662] In some embodiments, the variant binary complex comprises decreased at least one of off-target binding to a non-target nucleic acid, activity at a non-target locus of a target nucleic acid, binary complex dissociation, and/or dissociation from the target nucleic acid and the variant binary complex comprises a variant Cas12i2 polypeptide comprising an amino acid sequence having at least about 60%, 65%, 70%, 75%, 80%, 85%, 90%, 91%, 92%, 93%, 94%, 95%, 96%, 97%, 98%, 99%, or 100% identity to any one of SEQ ID NOs: 3-5, 495, or 496.

[0663] In some embodiments, the variant binary complex comprises decreased at least one of off-target binding to a non-target nucleic acid, activity at a non-target locus of a target nucleic acid, binary complex dissociation, and/or dissociation from the target nucleic acid and the variant binary complex comprises a variant Cas12i2 polypeptide comprising an amino acid sequence having at least about 60%, 65%, 70%, 75%, 80%, 85%, 90%, 91%, 92%, 93%, 94%, 95%, 96%, 97%, 98%, 99%, or 100% identity to any one of SEQ ID NOs: 3-146 and 495-512.

[0664] In some embodiments, the variant binary complex exhibits decreased at least one of complex (variant binary complex or variant ternary complex) dissociation and/or dissociation from a target locus at about 37° C. over an incubation period of at least about any one of 10 mins, 15 mins, 20 mins, 25 mins, 30 mins, 35 mins, 40 mins, 45 mins, 50 mins, 55 mins, 1 hr, 2 hr, 3 hr, 4 hr, or more hours as compared to a complex formed by a parent polypeptide and RNA guide. In some embodiments, a variant binary complex exhibits decreased at least one of complex (variant binary complex or variant ternary complex) dissociation and/or dissociation from a target locus over a range of incubation times as compared to a complex formed by a parent polypeptide and RNA guide.

[0665] In some embodiments, the variant binary complex exhibits decreased at least one of complex (variant binary complex or variant ternary complex) dissociation and/or dissociation from a target locus at about 37° C. over an incubation period of at least about any one of 10 mins, 15 mins, 20 mins, 25 mins, 30 mins, 35 mins, 40 mins, 45 mins, 50 mins, 55 mins, 1 hr, 2 hr, 3 hr, 4 hr, or more hours as compared to a parent binary complex. In some embodiments, the variant binary complex exhibits decreased at least one of complex (variant binary complex or variant ternary complex) dissociation and/or dissociation from a target locus over a range of incubation times as compared to a parent binary complex.

### Ternary Complex

[0666] In some aspects, a Cas12i2 polypeptide, a targeting moiety and a target nucleic acid form a complex. In some embodiments, a Cas12i2 polypeptide, e.g., a variant Cas12i2 polypeptide, a targeting moiety, e.g., an RNA guide as described herein, and a target nucleic acid (e.g., DNA) form a complex (e.g., a ternary complex, e.g., a ribonucleoprotein bound to DNA). In some embodiments, a Cas12i2 polypeptide, an RNA guide and target DNA form a ternary complex.

[0667] A ternary complex described herein, in some embodiments, comprises a variant Cas12i2 polypeptide that associates with at least one RNA guide (i.e., forms a variant binary complex), wherein each RNA guide targets and associates with a target nucleic acid such as DNA (i.e., forms a variant ternary complex). In some embodiments, the variant Cas12i2 polypeptide/RNA guide complex (e.g., variant binary complex) comprises enzymatic activity, such as nuclease activity, that may nick or cleave the target nucleic acid of the variant ternary complex. In some embodiments, the variant ternary complex comprises enzymatic activity, such as nuclease activity. The variant Cas12i2 polypeptide, the RNA guide, and the target nucleic acid, either alone or together, do not naturally occur.

[0668] Generally, the variant binary complex, e.g., the variant Cas12i2 polypeptide and the targeting moiety, binds to a target nucleic acid in a molar ratio of about 1:1 to form the variant ternary complex. Binding of the variant binary complex to the target nucleic acid, e.g., target DNA substrate, to form the variant ternary complex is referred to as loading the variant binary complex to the target nucleic acid.

[0669] Generally, the variant Cas12i2 polypeptide, the targeting moiety (e.g., RNA guide), and the target nucleic acid associate with each other in a molar ratio of about 1:1:1 to form the variant ternary complex.

[0670] In some embodiments, a target nucleic acid includes one or more target loci of a variant binary complex or plurality of variant binary complexes. In some embodiments, a target nucleic acid includes one or more non-target loci of a variant binary complex or plurality of variant binary complexes.

### Functionality of Ternary Complexes

[0671] In some aspects, the variant ternary complex comprises a variant Cas12i2 polypeptide with at least one alteration or mutation and the variant ternary complex has enhanced at least one of enzymatic activity, target nucleic acid complex formation, target nucleic acid binding activity, target nucleic acid affinity, target nucleic acid binding specificity, protein-nucleic acid interactions, ternary complex formation, on-target binding activity, on-target binding specificity, and/or stability.

[0672] In some aspects, the variant ternary complex comprises a variant Cas12i2 polypeptide with at least one alteration or mutation and the variant ternary complex has decreased at least one of dissociation from a target locus, off-target binding to a non-target nucleic acid, activity at a non-target locus of a target nucleic acid, and/or ternary complex dissociation.

[0673] In some aspects, a variant binary complex and a target nucleic acid (e.g., DNA) form a variant ternary complex, and the variant ternary complex exhibits increased at least one of enzymatic activity, target nucleic acid complex formation, target nucleic acid binding activity, target nucleic acid affinity, target nucleic acid binding specificity, protein-nucleic acid interactions, ternary complex formation, on-target binding activity, on-target binding specificity, and/or stability, as compared to a parent binary complex.

[0674] In some embodiments, the variant ternary complex exhibits at least one of enzymatic activity, target nucleic acid complex formation, target nucleic acid binding activity, target nucleic acid affinity, target nucleic acid binding specificity, protein-nucleic acid interactions, ternary complex formation, on-target binding activity, on-target binding specificity, and/or stability of the variant ternary complex at least 1%, 2%, 3%, 4%, 5%, 6%, 7%, 8%, 9%, 10%, 11%, 12%, 13%, 14%, 15%, 16%, 17%, 18%, 19%, 20%, 25%, 30%, 35%, 40%, 45%, 50%, 55%, 60%, 65%, 70%, 75%, 80%, 85%, 90%, 95%, or 100% greater than the enzymatic activity, target nucleic acid complex formation, target nucleic acid binding activity, target nucleic acid affinity, target nucleic acid binding specificity, protein-nucleic acid interactions, ternary complex formation, on-target binding activity, on-target binding specificity, and/or stability of a parent binary complex.

[0675] In some embodiments, the variant ternary complex exhibits enhanced at least one of enzymatic activity, target nucleic acid complex formation, target nucleic acid binding activity, target nucleic acid affinity, target nucleic acid binding specificity, protein-nucleic acid interactions, ternary complex formation, on-target binding activity, on-target binding specificity, and/or stability, as compared to a parent ternary complex, at a temperature in the range of about 20° C. to about 65° C., e.g., about any one of 20° C., 21° C., 22° C., 23° C., 24° C., 25° C., 26° C., 27° C., 28° C., 29° C., 30° C., 31° C., 32° C., 33° C., 34° C., 35° C., 36° C., 37° C., 38° C., 39° C., 40° C., 41° C., 42° C., 43° C., 44° C., 45° C., 50° C., 51° C., 52° C., 53° C., 54° C., 55° C., 56° C., 57° C., 58° C., 59° C., 60° C. or 65° C.

[0676] In some embodiments, the variant ternary complex exhibits enhanced at least one of enzymatic activity, target nucleic acid complex formation, target nucleic acid binding activity, target nucleic acid affinity, target nucleic acid binding specificity, protein-nucleic acid interactions, ternary complex formation, on-target binding activity, on-target binding specificity, and/or stability, as compared to a parent ternary complex, in a buffer having a pH in a range of about 7.3 to about 8.6 (e.g., 7.3, 7.4, 7.5, 7.6, 7.7, 7.8, 7.9, 8.0, 8.1, 8.2, 8.3, 8.4, 8.5, 8.6, or any value within a range between any combination of these values).

[0677] In some embodiments, the variant ternary complex exhibits enhanced at least one of enzymatic activity, target nucleic acid complex formation, target nucleic acid binding activity, target nucleic acid affinity, target nucleic acid binding specificity, protein-nucleic acid interactions, ternary complex formation, on-target binding activity, on-target binding specificity, and/or stability, as compared to a parent ternary complex, when the Tₘ value of the variant ternary complex is at least 1° C., 2° C., 3° C., 4° C., 5° C., 6° C., 7° C., 8° C., 9° C., 10° C., 11° C., 12° C., 13° C., 14° C., 15° C., 16° C., 17° C., 18° C., 19° C., or 20° C. greater than the Tₘ value of a parent ternary complex. In one embodiment, the variant ternary complex exhibits enhanced at least one of enzymatic activity, target nucleic acid complex formation, target nucleic acid binding activity, target nucleic acid affinity, target nucleic acid binding specificity, protein-nucleic acid interactions, ternary complex formation, on-target binding activity, on-target binding specificity, and/or stability when the Tₘ value of the variant ternary complex is at least 8° C. greater than the Tₘ value of the parent ternary complex.

[0678] In some embodiments, the variant ternary complex exhibits increased at least one of enzymatic activity, target nucleic acid complex formation, target nucleic acid binding activity, target nucleic acid affinity, target nucleic acid binding specificity, protein-nucleic acid interactions, ternary complex formation, on-target binding activity, on-target binding specificity, and/or stability at about 37° C. over an incubation period of at least about any one of 10 mins, 15 mins, 20 mins, 25 mins, 30 mins, 35 mins, 40 mins, 45 mins, 50 mins, 55 mins, 1 hr, 2 hr, 3 hr, 4 hr, or more hours as compared to a parent ternary complex. In some embodiments, a variant ternary complex exhibits increased at least one of enzymatic activity, target nucleic acid complex formation, target nucleic acid binding activity, target nucleic acid affinity, target nucleic acid binding specificity, protein-nucleic acid interactions, ternary complex formation, on-target binding activity, on-target binding specificity, and/or stability over a range of incubation times as compared to a parent ternary complex.

[0679] In some embodiments, the variant ternary complex exhibits enhanced at least one of enzymatic activity, target nucleic acid complex formation, target nucleic acid binding activity, target nucleic acid affinity, target nucleic acid binding specificity, protein-nucleic acid interactions, ternary complex formation, on-target binding activity, on-target binding specificity, and/or stability and the variant ternary complex comprises a variant Cas12i2 polypeptide comprising an amino acid sequence having at least about 60%, 65%, 70%, 75%, 80%, 85%, 90%, 91%, 92%, 93%, 94%, 95%, 96%, 97%, 98%, 99%, or 100% identity to any one of SEQ ID NO: 4.

[0680] In some embodiments, the variant ternary complex exhibits enhanced at least one of enzymatic activity, target nucleic acid complex formation, target nucleic acid binding activity, target nucleic acid affinity, target nucleic acid binding specificity, protein-nucleic acid interactions, ternary complex formation, on-target binding activity, on-target binding specificity, and/or stability and the variant ternary complex comprises a variant Cas12i2 polypeptide comprising an amino acid sequence having at least about 60%, 65%, 70%, 75%, 80%, 85%, 90%, 91%, 92%, 93%, 94%, 95%, 96%, 97%, 98%, 99%, or 100% identity to any one of SEQ ID NOs: 3-5, 495, or 496.

[0681] In some embodiments, the variant ternary complex exhibits enhanced at least one of enzymatic activity, target nucleic acid complex formation, target nucleic acid binding activity, target nucleic acid affinity, target nucleic acid binding specificity, protein-nucleic acid interactions, ternary complex formation, on-target binding activity, on-target binding specificity, and/or stability and the variant ternary complex comprises a variant Cas12i2 polypeptide comprising an amino acid sequence having at least about 60%, 65%, 70%, 75%, 80%, 85%, 90%, 91%, 92%, 93%, 94%, 95%, 96%, 97%, 98%, 99%, or 100% identity to any one of SEQ ID NOs: 3-146 and 495-512.

[0682] In some aspects, a variant binary complex and a target nucleic acid (e.g., DNA) form a variant ternary complex, and the variant ternary complex exhibits decreased at least one of dissociation from a target locus, off-target binding to a non-target nucleic acid, activity at a non-target locus of a target nucleic acid, and/or ternary complex dissociation, as compared to a parent binary complex.

[0683] In some embodiments, the variant ternary complex exhibits decreased at least one of dissociation from a target locus, off-target binding to a non-target nucleic acid, activity at a non-target locus of a target nucleic acid, and/or ternary complex dissociation of the variant ternary complex may be at least 1%, 2%, 3%, 4%, 5%, 6%, 7%, 8%, 9%, 10%, 11%, 12%, 13%, 14%, 15%, 16%, 17%, 18%, 19%, 20%, 25%, 30%, 35%, 40%, 45%, 50%, 55%, 60%, 65%, 70%, 75%, 80%, 85%, 90%, 95%, or 100% less than the dissociation from a target locus, off-target binding to a non-target nucleic acid, activity at a non-target locus of a target nucleic acid, and/or ternary complex dissociation of a parent binary complex.

[0684] In some embodiments, the variant ternary complex exhibits decreased at least one of dissociation from a target locus, off-target binding to a non-target nucleic acid, activity at a non-target locus of a target nucleic acid, and/or ternary complex dissociation at a temperature of about any one of 20° C., 21° C., 22° C., 23° C., 24° C., 25° C., 26° C., 27° C., 28° C., 29° C., 30° C., 31° C., 32° C., 33° C., 34° C., 35° C., 36° C., 37° C., 38° C., 39° C., 40° C., 41° C., 42° C., 43° C., 44° C., 45° C., 50° C., 51° C., 52° C., 53° C., 54° C., 55° C., 56° C., 57° C., 58° C., 59° C., 60° C. or 65° C. as compared to a parent ternary complex.

[0685] In some embodiments, the variant ternary complex exhibits decreased at least one of dissociation from a target locus, off-target binding to a non-target nucleic acid, activity at a non-target locus of a target nucleic acid, and/or ternary complex dissociation over a range of temperatures, from about 20° C. to about 65° C. as compared to a parent ternary complex. In some embodiments, the variant ternary complex exhibits decreased at least one of dissociation from a target locus, off-target binding to a non-target nucleic acid, activity at a non-target locus of a target nucleic acid, and/or ternary complex dissociation at about 37° C. over an incubation period of at least about any one of 10 mins, 15 mins, 20 mins, 25 mins, 30 mins, 35 mins, 40 mins, 45 mins, 50 mins, 55 mins, 1 hr, 2 hr, 3 hr, 4 hr, or more hours as compared to a parent ternary complex. In some embodiments, the variant ternary complex exhibits decreased at least one of dissociation from a target locus, off-target binding to a non-target nucleic acid, activity at a non-target locus of a target nucleic acid, and/or ternary complex dissociation over a range of incubation times as compared to a parent ternary complex.

[0686] In some embodiments, the variant ternary complex exhibits decreased at least one of dissociation from a target locus, off-target binding to a non-target nucleic acid, activity at a non-target locus of a target nucleic acid, and/or ternary complex dissociation in a buffer having a pH in a range of about 7.3 to about 8.6 than a parent ternary complex. In one embodiment, the variant ternary complex exhibits decreased at least one of dissociation from a target locus, off-target binding to a non-target nucleic acid, activity at a non-target locus of a target nucleic acid, and/or ternary complex dissociation in a pH of about 7.3, 7.4, 7.5, 7.6, 7.7, 7.8, 7.9, 8.0, 8.1, 8.2, 8.3, 8.4, 8.5, or 8.6 than a parent ternary complex.

[0687] In some embodiments, the variant ternary complex exhibits decreased at least one of dissociation from a target locus, off-target binding to a non-target nucleic acid, activity at a non-target locus of a target nucleic acid, and/or ternary complex dissociation when a Tₘ value of the variant ternary complex is at least 1° C., 2° C., 3° C., 4° C., 5° C., 6° C., 7° C., 8° C., 9° C., 10° C., 11° C., 12° C., 13° C., 14° C., 15° C., 16° C., 17° C., 18° C., 19° C., or 20° C. greater than the Tₘ value of the reference molecule or Tₘ of a reference value, e.g., of Tₘ of a parent ternary complex. In one embodiment, the variant ternary complex exhibits decreased at least one of dissociation from a target locus, off-target binding to a non-target nucleic acid, activity at a non-target locus of a target nucleic acid, and/or ternary complex dissociation when a Tₘ value of the variant ternary complex is at least 8° C. greater than the Tₘ value of the reference molecule or Tₘ of a reference value, e.g., Tₘ of a parent ternary complex.

[0688] In some embodiments, the variant ternary complex exhibits decreased at least one of at least one of dissociation from a target locus, off-target binding to a non-target nucleic acid, activity at a non-target locus of a target nucleic acid, and/or ternary complex dissociation and the variant ternary complex comprises a variant Cas12i2 polypeptide comprising an amino acid sequence having at least about 60%, 65%, 70%, 75%, 80%, 85%, 90%, 91%, 92%, 93%, 94%, 95%, 96%, 97%, 98%, 99%, or 100% identity to any one of SEQ ID NO: 4.

[0689] In some embodiments, the variant ternary complex exhibits decreased at least one of at least one of dissociation from a target locus, off-target binding to a non-target nucleic acid, activity at a non-target locus of a target nucleic acid, and/or ternary complex dissociation and the variant ternary complex comprises a variant Cas12i2 polypeptide comprising an amino acid sequence having at least about 60%, 65%, 70%, 75%, 80%, 85%, 90%, 91%, 92%, 93%, 94%, 95%, 96%, 97%, 98%, 99%, or 100% identity to any one of SEQ ID NOs: 3-5, 495, or 496.

[0690] In some embodiments, the variant ternary complex exhibits decreased at least one of at least one of dissociation from a target locus, off-target binding to a non-target nucleic acid, activity at a non-target locus of a target nucleic acid, and/or ternary complex dissociation and the variant ternary complex comprises a variant Cas12i2 polypeptide comprising an amino acid sequence having at least about 60%, 65%, 70%, 75%, 80%, 85%, 90%, 91%, 92%, 93%, 94%, 95%, 96%, 97%, 98%, 99%, or 100% identity to any one of SEQ ID NOs: 3-146 and 495-512.

[0691] In some embodiments, the variant ternary complex exhibits increased stability at about 37° C. over an incubation period of at least about any one of 10 mins, 15 mins, 20 mins, 25 mins, 30 mins, 35 mins, 40 mins, 45 mins, 50 mins, 55 mins, 1 hr, 2 hr, 3 hr, 4 hr, or more hours as compared to a parent ternary complex. In some embodiments, a variant ternary complex exhibits increased stability over a range of incubation times as compared to a parent ternary complex.

[0692] In some aspects, a variant binary complex exhibits decreased activity at a non-target locus of a target nucleic acid as compared to a parent binary complex. In some embodiments, non-target activity is assessed at a PAM-adjacent sequence of a particular Levenshtein distance (e.g., an edit distance of 1, 2, 3, or 4) from an on-target locus sequence. In some embodiments, activity at a non-target locus by a variant binary complex may be at least 1%, 2%, 3%, 4%, 5%, 6%, 7%, 8%, 9%, 10%, 11%, 12%, 13%, 14%, 15%, 16%, 17%, 18%, 19%, 20%, 25%, 30%, 35%, 40%, 45%, 50%, 55%, 60%, 65%, 70%, 75%, 80%, 85%, 90%, 95%, or 100% less than activity at the non-target locus by a parent binary complex.

### Plurality of Complexes

[0693] In some embodiments, two or more (e.g., 2, 3, 4, 5, 6, 7, 8, 9, or more) distinct variant Cas12i2 polypeptides and two or more (e.g., 2, 3, 4, 5, 6, 7, 8, 9, or more) distinct targeting moieties form individual variant binary complexes, and wherein the distinct variant binary complexes exhibit at least one or more of the characteristics of increased binding affinity to the target nucleic acid, increased target binding affinity to a target locus of a target nucleic acid, increased ternary complex formation, and/or increased stability over a range of incubation times. In such embodiments, complex formation may be accomplished simultaneously in a single composition or independently in separate compositions.

[0694] In some aspects, a plurality of Cas12i2 polypeptides, e.g., a plurality of variant Cas12i2 polypeptides, and two or more distinct targeting moieties, e.g., two or more distinct RNA guides, individually form binary complexes. For example, a first Cas12i2 polypeptide of SEQ ID NO: AA forms a first binary complex with an RNA guide of SEQ ID NO: BB (e.g., at a molar ratio of about 1:1), and a second Cas12i2 polypeptide of SEQ ID NO: AA forms a second binary complex with an RNA guide of SEQ ID NO: DD (e.g., at a molar ratio of about 1:1). In some embodiments, the two binary complexes specifically bind with distinct target loci of a target nucleic acid. For example, the first binary complex (e.g., Cas12i2 polypeptide of SEQ ID NO: AA/RNA guide of SEQ ID NO: BB) may specifically bind with target locus CC of the target nucleic acid (e.g., at a molar ratio of 1:1) to form a first ternary complex, and the second binary complex (e.g., Cas12i2 polypeptide of SEQ ID NO: AA/RNA guide of SEQ ID NO: YY) may specifically bind with target locus ZZ of the target nucleic acid (e.g., at a molar ratio of 1:1) to form a second ternary complex. As used herein, the term “a binary complex” refers to one or more distinct binary complexes, e.g., binary complexes each having distinct targeting moieties (e.g., distinct RNA guides) targeting distinct target loci (e.g., two or more target loci of a target nucleic acid). As used herein, the term “a ternary complex” refers to one or more distinct ternary complexes, e.g., ternary complexes comprising distinct targeting moieties (e.g., distinct RNA guides) bound to distinct target loci.

[0695] In some aspects, a plurality of variant Cas12i2 polypeptides and two or more targeting moieties (e.g., two or more RNA guides) form a plurality of variant binary complexes, and the plurality of variant binary complexes exhibit increased on-target binding to two or more target loci of a target nucleic acid, as compared to a plurality of parent binary complexes. In some embodiments, the on-target binding by the plurality of variant binary complexes may be at least 1%, 2%, 3%, 4%, 5%, 6%, 7%, 8%, 9%, 10%, 11%, 12%, 13%, 14%, 15%, 16%, 17%, 18%, 19%, 20%, 25%, 30%, 35%, 40%, 45%, 50%, 55%, 60%, 65%, 70%, 75%, 80%, 85%, 90%, 95%, or 100% greater than the on-target binding of a plurality of parent binary complexes to the two or more target loci.

[0696] In some aspects, a plurality of variant Cas12i2 polypeptides and two or more targeting moieties (e.g., two or more RNA guides) form a plurality of variant binary complexes, and the plurality of variant binary complexes exhibit increased on-target activity at two or more target loci of a target nucleic acid, as compared to a plurality of parent binary complexes. In some embodiments, the on-target activity by the plurality of variant binary complexes may be at least 1%, 2%, 3%, 4%, 5%, 6%, 7%, 8%, 9%, 10%, 11%, 12%, 13%, 14%, 15%, 16%, 17%, 18%, 19%, 20%, 25%, 30%, 35%, 40%, 45%, 50%, 55%, 60%, 65%, 70%, 75%, 80%, 85%, 90%, 95%, or 100% greater than the on-target activity of a plurality of parent binary complexes.

[0697] In some embodiments, the plurality of variant binary complexes form a plurality of variant ternary complexes with two or more target loci of a target nucleic acid at a temperature of about any one of 20° C., 21° C., 22° C., 23° C., 24° C., 25° C., 26° C., 27° C., 28° C., 29° C., 30° C., 31° C., 32° C., 33° C., 34° C., 35° C., 36° C., 37° C., 38° C., 39° C., 40° C., 41° C., 42° C., 43° C., 44° C., 45° C., 50° C., 51° C., 52° C., 53° C., 54° C., 55° C., 56° C., 57° C., 58° C., 59° C., 60° C. or 65° C. In some embodiments, the plurality of variant binary complexes form a plurality of variant ternary complexes over a range of temperatures, from about 20° C. to about 65° C.

[0698] In some embodiments, the plurality of variant binary complexes exhibit increased on-target binding of two or more target loci of a target nucleic acid, increased on-target ternary complex formation with two or more target loci of a target nucleic acid, and/or increased stability at a temperature of about any one of 20° C., 21° C., 22° C., 23° C., 24° C., 25° C., 26° C., 27° C., 28° C., 29° C., 30° C., 31° C., 32° C., 33° C., 34° C., 35° C., 36° C., 37° C., 38° C., 39° C., 40° C., 41° C., 42° C., 43° C., 44° C., 45° C., 50° C., 51° C., 52° C., 53° C., 54° C., 55° C., 56° C., 57° C., 58° C., 59° C., 60° C. or 65° C. as compared to a plurality of parent binary complexes. In some embodiments, the plurality of variant binary complexes exhibit increased on-target binding of two or more target loci of a target nucleic acid, increased on-target ternary complex formation with two or more target loci of a target nucleic acid, and/or increased stability over a range of temperatures, from about 20° C. to about 65° C. as compared to a plurality of parent binary complexes.

[0699] In some embodiments, the plurality of variant binary complexes exhibit decreased dissociation from the two or more target loci of a target nucleic acid at a temperature of about any one of 20° C., 21° C., 22° C., 23° C., 24° C., 25° C., 26° C., 27° C., 28° C., 29° C., 30° C., 31° C., 32° C., 33° C., 34° C., 35° C., 36° C., 37° C., 38° C., 39° C., 40° C., 41° C., 42° C., 43° C., 44° C., 45° C., 50° C., 51° C., 52° C., 53° C., 54° C., 55° C., 56° C., 57° C., 58° C., 59° C., 60° C. or 65° C. as compared to a plurality of parent binary complexes. In some embodiments, the plurality of variant binary complexes exhibit decreased dissociation from the two or more target loci of the target nucleic acid over a range of temperatures, from about 20° C. to about 65° C. as compared to a plurality of parent binary complexes.

[0700] In some embodiments, the plurality of variant binary complexes exhibit decreased dissociation from the two or more target loci of the target nucleic acid at about 37° C. over an incubation period of at least about any one of 10 mins, 15 mins, 20 mins, 25 mins, 30 mins, 35 mins, 40 mins, 45 mins, 50 mins, 55 mins, 1 hr, 2 hr, 3 hr, 4 hr, or more hours as compared to a plurality of parent binary complexes. In some embodiments, the plurality of variant binary complexes exhibit decreased dissociation from the two or more target loci of the target nucleic acid over a range of incubation times as compared to a plurality of parent binary complexes.

[0701] In some embodiments, the plurality of variant binary complexes exhibit decreased dissociation from the two or more target loci of a target nucleic acid in a buffer having a pH in a range of about 7.3 to about 8.6 than a plurality of parent binary complexes. In one embodiment, the plurality of variant binary complexes exhibit decreased dissociation from the two or more target loci of the target nucleic acid in a pH of about 7.3, 7.4, 7.5, 7.6, 7.7, 7.8, 7.9, 8.0, 8.1, 8.2, 8.3, 8.4, 8.5, or 8.6 than a plurality of parent binary complexes.

[0702] In some embodiments, the plurality of variant binary complexes exhibit decreased dissociation from the two or more target loci of a target nucleic acid when the Tₘ values of the plurality of variant binary complexes are at least 1° C., 2° C., 3° C., 4° C., 5° C., 6° C., 7° C., 8° C., 9° C., 10° C., 11° C., 12° C., 13° C., 14° C., 15° C., 16° C., 17° C., 18° C., 19° C., or 20° C. greater than the corresponding Tₘ values of reference complexes or reference Tₘ values, e.g., the Tₘ values of a plurality of parent binary complexes. In one embodiment, the plurality of variant binary complexes exhibit decreased dissociation from the two or more target loci of the target nucleic acid when the Tₘ values of the plurality of variant binary complexes are at least 8° C. greater than the corresponding Tₘ values of reference complexes or reference Tₘ values, e.g., the Tₘ values of a plurality of parent binary complexes.

[0703] In some embodiments, the plurality of variant binary complexes exhibit increased on-target binding of two or more target loci of a target nucleic acid, increased on-target ternary complex formation with two or more target loci of a target nucleic acid, and/or increased stability in a buffer having a pH in a range of about 7.3 to about 8.6 than a plurality of parent binary complexes. In one embodiment, the plurality of binary complexes exhibit increased on-target binding of two or more target loci of a target nucleic acid, increased on-target ternary complex formation with two or more target loci of a target nucleic acid, and/or increased stability in a pH of about 7.3, 7.4, 7.5, 7.6, 7.7, 7.8, 7.9, 8.0, 8.1, 8.2, 8.3, 8.4, 8.5, or 8.6 than a plurality of parent binary complexes.

[0704] In some embodiments, the plurality of variant binary complexes are stable in a buffer having a pH in a range of about 7.3 to 8.6. In one embodiment, the plurality of variant binary complexes are stable in a pH of about 7.3, 7.4, 7.5, 7.6, 7.7, 7.8, 7.9, 8.0, 8.1, 8.2, 8.3, 8.4, 8.5, or 8.6.

[0705] In some embodiments, the plurality of variant binary complexes may be stable if the Tₘ values of the plurality of variant binary complexes are at least 1° C., 2° C., 3° C., 4° C., 5° C., 6° C., 7° C., 8° C., 9° C., 10° C., 11° C., 12° C., 13° C., 14° C., 15° C., 16° C., 17° C., 18° C., 19° C., or 20° C. greater than the corresponding Tₘ values of the reference complexes or reference Tₘ values, e.g., the Tₘ values of a plurality of parent binary complexes. For example, in certain embodiments, the plurality of variant binary complexes are stable if the Tₘ values of the plurality of variant binary complexes are at least 8° C. greater than the corresponding Tₘ values of the reference complexes or reference Tₘ values, e.g., the Tₘ values of a plurality of parent binary complexes.

[0706] In some embodiments, the plurality of variant binary complexes exhibit increased stability when the Tₘ values of the plurality of variant binary complexes are at least 1° C., 2° C., 3° C., 4° C., 5° C., 6° C., 7° C., 8° C., 9° C., 10° C., 11° C., 12° C., 13° C., 14° C., 15° C., 16° C., 17° C., 18° C., 19° C., or 20° C. greater than the corresponding Tₘ values of the reference complexes or reference Tₘ values, e.g., the Tₘ values of a plurality of parent binary complexes. In one embodiment, the plurality of variant binary complexes exhibit increased stability when the Tₘ values of the plurality of variant binary complexes are at least 8° C. greater than the corresponding Tₘ values of the reference complexes or reference Tₘ values, e.g., the Tₘ values of a plurality of parent binary complexes.

[0707] In some embodiments, a plurality of variant binary complexes (e.g., binary complexes formed from a plurality of variant Cas12i2 polypeptides and a plurality of distinct targeting moieties) specifically bind to a plurality of target loci of a target nucleic acid. In some embodiments, the plurality of variant binary complexes exhibit increased on-target binding with two or more (e.g., 2, 3, 4, 5, 6, 7, 8, 9, 10, 11, 12, 13, 14, 15, 16, 17, 18, 19, 20, 21, 22, 23, 24, 25, 26, 27, 28, 29, 30, 31, 32, 33, 34, 35, 36, 37, 38, 39, 40, 41, 42, 43, 44, 45, 46, 47, 48, 49, 50, 51, 52, 53, 54, 55, 56, 57, 58, 59, 60, 61, 62, 63, 64, 65, 66, 67, 68, 69, 70, 71, 72, 73, 74, 75, 76, 77, 78, 79, 80, 81, 82, 83, 84, 85, 86, 87, 88, 89, 90, 91, 92, 93, 94, 95, 96, 97, 98, 99, 100, 101, 102, 103, 104, 105, 106, 107, 108, 109, 110, 111, 112, 113, 114, 115, 116, 117, 118, 119, 120, 121, 122, 123, 124, 125, 126, 127, 128, 129, 130, 131, 132, 133, 134, 135, 136, 137, 138, 139, 140, 141, 142, 143, 144, 145, 146, 147, 148, 149, 150, 151, 152, 153, 154, 155, 156, 157, 158, 159, 160, 161, 162, 162, 164, 164, 165, 166, 167, 168, 169, 170, 171, 172, 173, 174, 175, 176, 177, 178, 179, 180, 181, 182, 183, 184, 185, 186, 187, 188, 189, 190, 191, 193, 194, 195, 196, 197, 198, 199, 200, or more) target loci, as compared to a plurality of parent binary complexes.

[0708] In some embodiments, a plurality of variant binary complexes (e.g., binary complexes formed from a plurality of variant Cas12i2 polypeptides and a plurality of RNA guides) specifically bind to a plurality of target loci of a target nucleic acid. In some embodiments, the plurality of variant binary complexes exhibit increased on-target binding with two or more (e.g., 2, 3, 4, 5, 6, 7, 8, 9, 10, 11, 12, 13, 14, 15, 16, 17, 18, 19, 20, 21, 22, 23, 24, 25, 26, 27, 28, 29, 30, 31, 32, 33, 34, 35, 36, 37, 38, 39, 40, 41, 42, 43, 44, 45, 46, 47, 48, 49, 50, 51, 52, 53, 54, 55, 56, 57, 58, 59, 60, 61, 62, 63, 64, 65, 66, 67, 68, 69, 70, 71, 72, 73, 74, 75, 76, 77, 78, 79, 80, 81, 82, 83, 84, 85, 86, 87, 88, 89, 90, 91, 92, 93, 94, 95, 96, 97, 98, 99, 100, 101, 102, 103, 104, 105, 106, 107, 108, 109, 110, 111, 112, 113, 114, 115, 116, 117, 118, 119, 120, 121, 122, 123, 124, 125, 126, 127, 128, 129, 130, 131, 132, 133, 134, 135, 136, 137, 138, 139, 140, 141, 142, 143, 144, 145, 146, 147, 148, 149, 150, 151, 152, 153, 154, 155, 156, 157, 158, 159, 160, 161, 162, 162, 164, 164, 165, 166, 167, 168, 169, 170, 171, 172, 173, 174, 175, 176, 177, 178, 179, 180, 181, 182, 183, 184, 185, 186, 187, 188, 189, 190, 191, 193, 194, 195, 196, 197, 198, 199, 200, or more) target loci, as compared to a plurality of parent binary complexes.

[0709] In some embodiments, a plurality of variant binary complexes (e.g., binary complexes formed from a plurality of variant Cas12i2 polypeptides and a plurality of distinct targeting moieties) exhibit ternary complex formation with a plurality of target loci of a target nucleic acid. In some embodiments, the plurality of variant binary complexes exhibit increased ternary complex formation with two or more (e.g., 2, 3, 4, 5, 6, 7, 8, 9, 10, 11, 12, 13, 14, 15, 16, 17, 18, 19, 20, 21, 22, 23, 24, 25, 26, 27, 28, 29, 30, 31, 32, 33, 34, 35, 36, 37, 38, 39, 40, 41, 42, 43, 44, 45, 46, 47, 48, 49, 50, 51, 52, 53, 54, 55, 56, 57, 58, 59, 60, 61, 62, 63, 64, 65, 66, 67, 68, 69, 70, 71, 72, 73, 74, 75, 76, 77, 78, 79, 80, 81, 82, 83, 84, 85, 86, 87, 88, 89, 90, 91, 92, 93, 94, 95, 96, 97, 98, 99, 100, 101, 102, 103, 104, 105, 106, 107, 108, 109, 110, 111, 112, 113, 114, 115, 116, 117, 118, 119, 120, 121, 122, 123, 124, 125, 126, 127, 128, 129, 130, 131, 132, 133, 134, 135, 136, 137, 138, 139, 140, 141, 142, 143, 144, 145, 146, 147, 148, 149, 150, 151, 152, 153, 154, 155, 156, 157, 158, 159, 160, 161, 162, 162, 164, 164, 165, 166, 167, 168, 169, 170, 171, 172, 173, 174, 175, 176, 177, 178, 179, 180, 181, 182, 183, 184, 185, 186, 187, 188, 189, 190, 191, 193, 194, 195, 196, 197, 198, 199, 200, or more) target loci, as compared to a plurality of parent binary complexes.

[0710] In some embodiments, a plurality of variant binary complexes (e.g., binary complexes formed from a plurality of variant Cas12i2 polypeptides and a plurality of RNA guides) exhibit ternary complex formation with a plurality of target loci of a target nucleic acid. In some embodiments, the plurality of variant binary complexes exhibit increased ternary complex formation with two or more (e.g., 2, 3, 4, 5, 6, 7, 8, 9, 10, 11, 12, 13, 14, 15, 16, 17, 18, 19, 20, 21, 22, 23, 24, 25, 26, 27, 28, 29, 30, 31, 32, 33, 34, 35, 36, 37, 38, 39, 40, 41, 42, 43, 44, 45, 46, 47, 48, 49, 50, 51, 52, 53, 54, 55, 56, 57, 58, 59, 60, 61, 62, 63, 64, 65, 66, 67, 68, 69, 70, 71, 72, 73, 74, 75, 76, 77, 78, 79, 80, 81, 82, 83, 84, 85, 86, 87, 88, 89, 90, 91, 92, 93, 94, 95, 96, 97, 98, 99, 100, 101, 102, 103, 104, 105, 106, 107, 108, 109, 110, 111, 112, 113, 114, 115, 116, 117, 118, 119, 120, 121, 122, 123, 124, 125, 126, 127, 128, 129, 130, 131, 132, 133, 134, 135, 136, 137, 138, 139, 140, 141, 142, 143, 144, 145, 146, 147, 148, 149, 150, 151, 152, 153, 154, 155, 156, 157, 158, 159, 160, 161, 162, 162, 164, 164, 165, 166, 167, 168, 169, 170, 171, 172, 173, 174, 175, 176, 177, 178, 179, 180, 181, 182, 183, 184, 185, 186, 187, 188, 189, 190, 191, 193, 194, 195, 196, 197, 198, 199, 200, or more) target loci, as compared to a plurality of parent binary complexes.

[0711] In some embodiments, the plurality of variant ternary complexes exhibit increased stability at a temperature of about any one of 20° C., 21° C., 22° C., 23° C., 24° C., 25° C., 26° C., 27° C., 28° C., 29° C., 30° C., 31° C., 32° C., 33° C., 34° C., 35° C., 36° C., 37° C., 38° C., 39° C., 40° C., 41° C., 42° C., 43° C., 44° C., 45° C., 50° C., 51° C., 52° C., 53° C., 54° C., 55° C., 56° C., 57° C., 58° C., 59° C., 60° C. or 65° C. as compared to a plurality of parent ternary complexes. In some embodiments, the plurality of variant ternary complexes exhibit increased ternary complex formation at a target locus and/or increased stability over a range of temperatures, from about 20° C. to about 65° C. as compared to a plurality of parent ternary complexes.

[0712] In some embodiments, the plurality of variant ternary complexes exhibit increased stability at about 37° C. over an incubation period of at least about any one of 10 mins, 15 mins, 20 mins, 25 mins, 30 mins, 35 mins, 40 mins, 45 mins, 50 mins, 55 mins, 1 hr, 2 hr, 3 hr, 4 hr, or more hours as compared to a plurality of parent ternary complexes. In some embodiments, the plurality of variant ternary complexes exhibit increased stability over a range of incubation times as compared to a plurality of parent ternary complexes.

[0713] In some embodiments, the plurality of variant ternary complexes exhibit increased stability in a buffer having a pH in a range of about 7.3 to 8.6. In one embodiment, the plurality of variant ternary complexes exhibit increased stability in a pH of about 7.3, 7.4, 7.5, 7.6, 7.7, 7.8, 7.9, 8.0, 8.1, 8.2, 8.3, 8.4, 8.5, or 8.6. In some embodiments, the plurality of variant ternary complexes exhibit increased stability in a buffer having a pH in a range of about 7.3 to 8.6 as compared to a plurality of parent ternary complexes. In one embodiment, the plurality of variant ternary complexes exhibit increased stability in a pH of about 7.3, 7.4, 7.5, 7.6, 7.7, 7.8, 7.9, 8.0, 8.1, 8.2, 8.3, 8.4, 8.5, or 8.6 as compared to a plurality of parent ternary complexes.

[0714] In some embodiments, the plurality of variant ternary complexes exhibit increased stability if the Tₘ values of the plurality of variant ternary complexes is at least 1° C., 2° C., 3° C., 4° C., 5° C., 6° C., 7° C., 8° C., 9° C., 10° C., 11° C., 12° C., 13° C., 14° C., 15° C., 16° C., 17° C., 18° C., 19° C., or 20° C. greater than the Tₘ values of reference complexes or Tₘ reference values, e.g., the Tₘ values of a plurality of parent ternary complexes. For example, in certain embodiments, the plurality of variant ternary complexes exhibit increased stability if the Tₘ values of the plurality of variant ternary complexes are at least 8° C. greater than the Tₘ values of reference complexes or Tₘ reference values, e.g., the Tₘ values of a plurality of parent ternary complexes.

[0715] In some embodiments, the plurality of variant ternary complexes exhibit decreased dissociation of two or more target loci at a range of temperatures, incubation times, pH values, and Tₘ values.

[0716] In some embodiments, the plurality of variant ternary complexes exhibit decreased dissociation of their two or more target loci at a temperature of about any one of 20° C., 21° C., 22° C., 23° C., 24° C., 25° C., 26° C., 27° C., 28° C., 29° C., 30° C., 31° C., 32° C., 33° C., 34° C., 35° C., 36° C., 37° C., 38° C., 39° C., 40° C., 41° C., 42° C., 43° C., 44° C., 45° C., 50° C., 51° C., 52° C., 53° C., 54° C., 55° C., 56° C., 57° C., 58° C., 59° C., 60° C. or 65° C. as compared to a plurality of parent ternary complexes. In some embodiments, the plurality of variant ternary complexes exhibit decreased dissociation of their two or more target loci over a range of temperatures, from about 20° C. to about 65° C. as compared to a plurality of parent ternary complexes.

[0717] In some embodiments, the plurality of variant ternary complexes exhibit decreased dissociation of their two or more target loci at about 37° C. over an incubation period of at least about any one of 10 mins, 15 mins, 20 mins, 25 mins, 30 mins, 35 mins, 40 mins, 45 mins, 50 mins, 55 mins, 1 hr, 2 hr, 3 hr, 4 hr, or more hours as compared to a plurality of parent ternary complexes. In some embodiments, the plurality of variant ternary complexes exhibit decreased dissociation of their two or more target loci over a range of incubation times as compared to a plurality of parent ternary complexes.

[0718] In some embodiments, the plurality of variant ternary complexes exhibit decreased dissociation of their two or more target loci in a buffer having a pH in a range of about 7.3 to about 8.6 than a plurality of parent ternary complexes. In some embodiments, the plurality of variant ternary complexes exhibit decreased dissociation of their two or more target loci in a pH of about 7.3, 7.4, 7.5, 7.6, 7.7, 7.8, 7.9, 8.0, 8.1, 8.2, 8.3, 8.4, 8.5, or 8.6 than a plurality of parent ternary complexes.

[0719] In some embodiments, the plurality of variant ternary complexes exhibit decreased dissociation of their two or more target loci when a Tₘ values of the plurality of variant ternary complexes are at least 1° C., 2° C., 3° C., 4° C., 5° C., 6° C., 7° C., 8° C., 9° C., 10° C., 11° C., 12° C., 13° C., 14° C., 15° C., 16° C., 17° C., 18° C., 19° C., or 20° C. greater than the Tₘ values of reference complexes or Tₘ reference values, e.g., of Tₘ values of a plurality of parent ternary complexes. In some embodiments, the plurality of variant ternary complexes exhibit decreased dissociation of their two or more target loci when the Tₘ values of the variant ternary complexes are at least 8° C. greater than the Tₘ values of reference complexes or Tₘ reference values, e.g., the Tₘ values of a plurality of parent ternary complexes.

[0720] In some aspects, a plurality of variant Cas12i2 polypeptides and two or more targeting moieties (e.g., two or more RNA guides) form a plurality of variant binary complexes, and the plurality of variant binary complexes exhibit decreased off-target binding to two or more non-target loci of a target nucleic acid, as compared to a plurality of parent binary complexes. In some embodiments, the off-target binding by the plurality of variant binary complexes may be at least 1%, 2%, 3%, 4%, 5%, 6%, 7%, 8%, 9%, 10%, 11%, 12%, 13%, 14%, 15%, 16%, 17%, 18%, 19%, 20%, 25%, 30%, 35%, 40%, 45%, 50%, 55%, 60%, 65%, 70%, 75%, 80%, 85%, 90%, 95%, or 100% less than the off-target binding of a parent binary complex to the two or more non-target loci.

[0721] In some aspects, a plurality of variant Cas12i2 polypeptides and two or more targeting moieties (e.g., two or more RNA guides) form a plurality of variant binary complexes, and the plurality of variant binary complexes exhibit decreased off-target activity at two or more non-target loci of a target nucleic acid, as compared to a parent binary complex. In some embodiments, the off-target activity by the plurality of variant binary complexes may be at least 1%, 2%, 3%, 4%, 5%, 6%, 7%, 8%, 9%, 10%, 11%, 12%, 13%, 14%, 15%, 16%, 17%, 18%, 19%, 20%, 25%, 30%, 35%, 40%, 45%, 50%, 55%, 60%, 65%, 70%, 75%, 80%, 85%, 90%, 95%, or 100% less than the off-target activity of a plurality of parent binary complexes.

[0722] Unless otherwise noted, all compositions and complexes and polypeptides provided herein are made in reference to the active level of that composition or complex or polypeptide, and are exclusive of impurities, for example, residual solvents or by-products, which may be present in commercially available sources. Enzymatic component weights are based on total active protein. All percentages and ratios are calculated by weight unless otherwise indicated. All percentages and ratios are calculated based on the total composition unless otherwise indicated. In the exemplified composition, the enzymatic levels are expressed by pure enzyme by weight of the total composition and unless otherwise specified, the ingredients are expressed by weight of the total compositions.

### Activity

[0723] Described in the invention herein are variant Cas12i2 polypeptides and variant binary complexes having higher on-target specificity and lowered off-target effects, such as nicking or cleaving an off-target locus or multiple off-target loci. Off-target effects, even with low frequency of occurrence, can lead to genetic instability and disruption of gene function.

[0724] In some embodiments, compositions described herein comprise a complex, e.g., a binary complex comprising a variant Cas12i2 polypeptide (e.g., a variant binary complex) having decreased off-target interactions and/or decreased activity at a non-target locus or non-target loci, e.g., decreased interactions and/or activity with a non-target nucleic acid. Indeed, in the examples, it is shown that the invention involves variant Cas12i2 polypeptides that form variant binary complexes having increased on-target activity and decreased off-target activity.

[0725] In some embodiments, an on-target locus and a non-target locus are on the same nucleic acid (e.g., the same chromosome). In some embodiments, an on-target locus and a non-target locus are on different nucleic acids (e.g., different chromosomes).

[0726] In some embodiments, on-target activity and off-target activity are measured by first identifying non-target loci sequences of a particular Levenshtein distance (also referred to as an edit distance) from an on-target locus sequence and measuring indels at both the on-target locus and the non-target locus, as shown in Example 6. Edit distance refers to the minimum number of edits (e.g., insertions, deletions, or substitutions) required to change a first sequence (e.g., an off-target sequence) to a second sequence (e.g., an on-target sequence). For example, two edits (e.g., two insertions, two deletions, two substitutions, one insertion and one deletion, one insertion and one substitution, or one deletion and one substitution) are required to change the sequence of an off-target sequence with an edit distance of 2 to an on-target sequence. Five exemplary sequences are shown in FIG. 13: an on-target sequence, an off-target sequence with an edit distance of 1, an off-target sequence with an edit distance of 2, an off-target sequence with an edit distance of 3, and an off-target sequence with an edit distance of 4.

[0727] In some embodiments, a variant binary complex is formed with a variant Cas12i2 polypeptide and a targeting moiety (e.g., an RNA guide) targeting a target locus, and activity (e.g., nuclease activity) of the variant binary complex is measured at the target locus and a non-target locus to determine both on-target activity and off-target activity. In some embodiments, a sequence having an edit distance of 1, 2, 3, 4, 5, 6, 7, 8, 9, 10 or greater is selected to measure off-target activity, as described in Example 14. In some embodiments, the variant binary complex exhibits decreased activity or lack of edits at a non-target locus.

[0728] Accordingly, in the context of the present invention, the degree of decreased off-target activity (e.g., off-target nuclease activity) and/or increased on-target activity (e.g., on-target nuclease activity) between a variant binary complex and a parent binary complex may differ by about 4%, 5%, 6%, 7%, 8%, 9%, 10%, 11%, 12%, 13%, 14%, 15%, 16%, 17%, 18%, 19%, 20%, 21%, 22%, 23%, 24%, 25%, 26%, 27%, 28%, 29%, 30%, 31%, 32%, 33%, 34%, 35%, 36%, 37%, 38%, 39%, 40%, 41%, 42%, 43%, 44%, 45%, 46%, 47%, 48%, 49%, 50%, 51%, 52%, 53%, 54%, 55%, 56%, 57%, 58%, 59%, 60%, 61%, 62%, 63%, 64%, 65%, 66%, 67%, 68%, 69%, 70%, 71%, 72%, 73% 74%, 75%, 76%, 77%, 78%, 79%, 80%, 81%, 82%, 83%, 84%, 85%, 86%, 87%, 88%, 89%, 90%, 91%, 92%, 93%, 94%, 95%, 96%, 97%, 98%, 99%, 100%, or more.

[0729] In some embodiments, off-target activity by a variant binary complex is decreased by at least about 4%, 5%, 6%, 7%, 8%, 9%, 10%, 11%, 12%, 13%, 14%, 15%, 16%, 17%, 18%, 19%, 20%, 21%, 22%, 23%, 24%, 25%, 26%, 27%, 28%, 29%, 30%, 31%, 32%, 33%, 34%, 35%, 36%, 37%, 38%, 39%, 40%, 41%, 42%, 43%, 44%, 45%, 46%, 47%, 48%, 49%, 50%, 51%, 52%, 53%, 54%, 55%, 56%, 57%, 58%, 59%, 60%, 61%, 62%, 63%, 64%, 65%, 66%, 67%, 68%, 69%, 70%, 71%, 72%, 73% 74%, 75%, 76%, 77%, 78%, 79%, 80%, 81%, 82%, 83%, 84%, 85%, 86%, 87%, 88%, 89%, 90%, 91%, 92%, 93%, 94%, 95%, 96%, 97%, 98%, 99%, or 100% as compared to off-target activity by a parent binary complex.

[0730] In some embodiments, on-target activity by a variant binary complex is increased by at least about 4%, 5%, 6%, 7%, 8%, 9%, 10%, 11%, 12%, 13%, 14%, 15%, 16%, 17%, 18%, 19%, 20%, 21%, 22%, 23%, 24%, 25%, 26%, 27%, 28%, 29%, 30%, 31%, 32%, 33%, 34%, 35%, 36%, 37%, 38%, 39%, 40%, 41%, 42%, 43%, 44%, 45%, 46%, 47%, 48%, 49%, 50%, 51%, 52%, 53%, 54%, 55%, 56%, 57%, 58%, 59%, 60%, 61%, 62%, 63%, 64%, 65%, 66%, 67%, 68%, 69%, 70%, 71%, 72%, 73% 74%, 75%, 76%, 77%, 78%, 79%, 80%, 81%, 82%, 83%, 84%, 85%, 86%, 87%, 88%, 89%, 90%, 91%, 92%, 93%, 94%, 95%, 96%, 97%, 98%, 99%, 100%, 110%, 120%, 130%, 140%, 150%, 160%, 170%, 180%, 190%, 200%, or more as compared to on-target activity by a parent binary complex.

[0731] In some embodiments, increased activity of a variant binary complex at a target locus (on-target activity), as compared to a reference, is associated with decreased activity of the variant binary complex at a non-target locus (e.g., off-target activity), as compared to a reference. In some embodiments, activity of a variant binary complex at a target locus (on-target activity) is inversely associated with activity of the variant binary complex at a non-target locus (e.g., off-target activity). In some embodiments, increased activity of a variant binary complex at a target locus by at least about 4%, 5%, 6%, 7%, 8%, 9%, 10%, 11%, 12%, 13%, 14%, 15%, 16%, 17%, 18%, 19%, 20%, 21%, 22%, 23%, 24%, 25%, 26%, 27%, 28%, 29%, 30%, 31%, 32%, 33%, 34%, 35%, 36%, 37%, 38%, 39%, 40%, 41%, 42%, 43%, 44%, 45%, 46%, 47%, 48%, 49%, 50%, 51%, 52%, 53%, 54%, 55%, 56%, 57%, 58%, 59%, 60%, 61%, 62%, 63%, 64%, 65%, 66%, 67%, 68%, 69%, 70%, 71%, 72%, 73% 74%, 75%, 76%, 77%, 78%, 79%, 80%, 81%, 82%, 83%, 84%, 85%, 86%, 87%, 88%, 89%, 90%, 91%, 92%, 93%, 94%, 95%, 96%, 97%, 98%, 99%, 100%, 110%, 120%, 130%, 140%, 150%, 160%, 170%, 180%, 190%, 200%, or more, as compared to a reference (e.g., on-target activity by a parent binary complex), is associated with decreased activity of the variant binary complex at a non-target locus by at least about 4%, 5%, 6%, 7%, 8%, 9%, 10%, 11%, 12%, 13%, 14%, 15%, 16%, 17%, 18%, 19%, 20%, 21%, 22%, 23%, 24%, 25%, 26%, 27%, 28%, 29%, 30%, 31%, 32%, 33%, 34%, 35%, 36%, 37%, 38%, 39%, 40%, 41%, 42%, 43%, 44%, 45%, 46%, 47%, 48%, 49%, 50%, 51%, 52%, 53%, 54%, 55%, 56%, 57%, 58%, 59%, 60%, 61%, 62%, 63%, 64%, 65%, 66%, 67%, 68%, 69%, 70%, 71%, 72%, 73% 74%, 75%, 76%, 77%, 78%, 79%, 80%, 81%, 82%, 83%, 84%, 85%, 86%, 87%, 88%, 89%, 90%, 91%, 92%, 93%, 94%, 95%, 96%, 97%, 98%, 99%, 100%, 110%, 120%, 130%, 140%, 150%, 160%, 170%, 180%, 190%, 200%, or more, as compared to a reference (e.g., off-target activity by a parent binary complex). In some embodiments, increased activity of a variant binary complex at a target locus (on-target activity), as compared to a reference, results in decreased activity of the variant binary complex at a non-target locus (e.g., off-target activity), as compared to a reference.

[0732] In some embodiments, increased activity of a plurality of variant binary complexes at two or more target loci (on-target activity), as compared to a reference, is associated with decreased activity of the plurality of variant binary complexes at two or more non-target loci (e.g., off-target activity), as compared to a reference. In some embodiments, activity of a plurality of variant binary complexes at two or more target loci (e.g., on-target activity) is inversely associated with activity of the plurality of variant binary complexes at two or more non-target loci (e.g., off-target activity). In some embodiments, increased activity of a plurality of variant binary complexes at two or more target loci (on-target activity) by at least about 4%, 5%, 6%, 7%, 8%, 9%, 10%, 11%, 12%, 13%, 14%, 15%, 16%, 17%, 18%, 19%, 20%, 21%, 22%, 23%, 24%, 25%, 26%, 27%, 28%, 29%, 30%, 31%, 32%, 33%, 34%, 35%, 36%, 37%, 38%, 39%, 40%, 41%, 42%, 43%, 44%, 45%, 46%, 47%, 48%, 49%, 50%, 51%, 52%, 53%, 54%, 55%, 56%, 57%, 58%, 59%, 60%, 61%, 62%, 63%, 64%, 65%, 66%, 67%, 68%, 69%, 70%, 71%, 72%, 73% 74%, 75%, 76%, 77%, 78%, 79%, 80%, 81%, 82%, 83%, 84%, 85%, 86%, 87%, 88%, 89%, 90%, 91%, 92%, 93%, 94%, 95%, 96%, 97%, 98%, 99%, 100%, 110%, 120%, 130%, 140%, 150%, 160%, 170%, 180%, 190%, 200%, or more, as compared to a reference (e.g., on-target activity by a parent binary complex), is associated with decreased activity of the plurality of variant binary complexes at two or more non-target loci (e.g., off-target activity) by at least about 4%, 5%, 6%, 7%, 8%, 9%, 10%, 11%, 12%, 13%, 14%, 15%, 16%, 17%, 18%, 19%, 20%, 21%, 22%, 23%, 24%, 25%, 26%, 27%, 28%, 29%, 30%, 31%, 32%, 33%, 34%, 35%, 36%, 37%, 38%, 39%, 40%, 41%, 42%, 43%, 44%, 45%, 46%, 47%, 48%, 49%, 50%, 51%, 52%, 53%, 54%, 55%, 56%, 57%, 58%, 59%, 60%, 61%, 62%, 63%, 64%, 65%, 66%, 67%, 68%, 69%, 70%, 71%, 72%, 73% 74%, 75%, 76%, 77%, 78%, 79%, 80%, 81%, 82%, 83%, 84%, 85%, 86%, 87%, 88%, 89%, 90%, 91%, 92%, 93%, 94%, 95%, 96%, 97%, 98%, 99%, 100%, 110%, 120%, 130%, 140%, 150%, 160%, 170%, 180%, 190%, 200%, or more as compared to a reference (e.g., off-target activity by a parent binary complex). In some embodiments, increased activity of a plurality of variant binary complexes at two or more target loci (e.g., on-target activity), as compared to a reference, results in decreased activity of the plurality of variant binary complexes at two or more non-target loci (e.g., off-target activity), as compared to a reference.

### Binding Activity

[0733] As used herein, the term “binding affinity” generally refers to an overall binding property of a first agent (e.g., a variant Cas12i2 polypeptide and/or a binary complex) interacting with a second agent (e.g., a targeting moiety and/or on-target locus of a target nucleic acid). In some embodiments, the binding affinity may be assessed or measured under a specific condition, and the overall binding property may be dependent on one or more intrinsic characteristics of the first agent and/or second agent including, but not limited to, surface composition of the first agent and/or the second agent (e.g., but not limited to, concentration of first agent in the present of the second agent), intermolecular-bond affinity (e.g., ionic bond formation), avidity, as well as the surrounding/ambient condition for the binding interaction, e.g., but not limited to, concentration of the first agent and/or the second agent, and/or the presence of a third agent (e.g., a target nucleic acid, a non-target nucleic acid, and/or an interfering agent) during the binding interaction between the first and the second agents.

[0734] Different measures of determining binding affinity of an agent are known in the art. In some embodiments, the binding affinity of a variant Cas12i2 polypeptide to a targeting moiety can be indicated by a dissociation constant (KD) for binding of the variant Cas12i2 polypeptide to the targeting moiety. In some embodiments, the binding affinity of binary complex to a target nucleic acid can be indicated by a dissociation constant (KD) for binding of the binary complex to the target nucleic acid. The dissociation constant (KD) is an equilibrium constant that generally measures the propensity of a binary or ternary complex to separate (dissociate) reversibly into separate agents. In these embodiments, a higher dissociation constant indicates a lower binding affinity. Alternatively, the binding affinity of a first agent (e.g., variant Cas12i2 polypeptide or binary complex) to a second agent (e.g., targeting moiety or target nucleic acid) can be indicated by an association constant (KA) for binding of the first agent to the second agent.

[0735] In some embodiments, the binding affinity is indicated by a dissociation constant (KD) for (non-specific) binding of a variant Cas12i2 polypeptide or binary complex to a non-targeting moiety or non-target nucleic acid. In some embodiments, the binding affinity of a variant Cas12i2 polypeptide to a non-target nucleic acid can be indicated by a dissociation constant (KD) for binding of the variant Cas12i2 polypeptide to the non-targeting moiety. In some embodiments, the binding affinity of a binary complex to a non-target nucleic acid can be indicated by a dissociation constant (KD) for binding of the binary complex to the non-target nucleic acid. The dissociation constant (KD) is an equilibrium constant that generally measures the propensity of a binary or ternary complex to separate (dissociate) reversibly into separate agents. In these embodiments, a higher dissociation constant indicates a lower binding affinity. Alternatively, the binding affinity of a first agent (e.g., variant Cas12i2 polypeptide or binary complex) to a second agent (e.g., non-targeting moiety or non-target nucleic acid) can be indicated by an association constant (KA) for binding of the first agent to the second agent.

[0736] In some embodiments, detection methods known in the art can be performed to measure binding affinity, e.g., using a “sandwich” method such as ELISA or any other detection methods.

[0737] In some embodiments, the KD value of the present invention may be below a KD value said to be characteristic for a non-specific binding of a first agent to a second agent. As will be acknowledged by the ones skilled in the art, the KD value of a binary or ternary complex comprising a variant Cas12i2 polypeptide may be within a certain range as compared to a binary or ternary complex comprising a parent polypeptide. The above-mentioned KD of the binary or ternary complex comprising a parent polypeptide may be an upper limit for the KD value of the binary or ternary complex comprising a variant Cas12i2 polypeptide. It is within the present invention that the KD values of individual variant Cas12i2 polypeptides in respective binary or ternary complexes may exhibit different KD values.

[0738] In the context of the present invention, the degree of decreased binding affinity to a non-target locus and/or increased on-target binding affinity between a variant binary complex and a parent binary complex may differ by about 4%, 5%, 6%, 7%, 8%, 9%, 10%, 11%, 12%, 13%, 14%, 15%, 16%, 17%, 18%, 19%, 20%, 21%, 22%, 23%, 24%, 25%, 26%, 27%, 28%, 29%, 30%, 31%, 32%, 33%, 34%, 35%, 36%, 37%, 38%, 39%, 40%, 41%, 42%, 43%, 44%, 45%, 46%, 47%, 48%, 49%, 50%, 51%, 52%, 53%, 54%, 55%, 56%, 57%, 58%, 59%, 60%, 61%, 62%, 63%, 64%, 65%, 66%, 67%, 68%, 69%, 70%, 71%, 72%, 73% 74%, 75%, 76%, 77%, 78%, 79%, 80%, 81%, 82%, 83%, 84%, 85%, 86%, 87%, 88%, 89%, 90%, 91%, 92%, 93%, 94%, 95%, 96%, 97%, 98%, 99%, 100%, or more.

[0739] In some embodiments, binding affinity of a variant binary complex to a non-target locus (e.g., off-target binding affinity) is decreased by at least about 4%, 5%, 6%, 7%, 8%, 9%, 10%, 11%, 12%, 13%, 14%, 15%, 16%, 17%, 18%, 19%, 20%, 21%, 22%, 23%, 24%, 25%, 26%, 27%, 28%, 29%, 30%, 31%, 32%, 33%, 34%, 35%, 36%, 37%, 38%, 39%, 40%, 41%, 42%, 43%, 44%, 45%, 46%, 47%, 48%, 49%, 50%, 51%, 52%, 53%, 54%, 55%, 56%, 57%, 58%, 59%, 60%, 61%, 62%, 63%, 64%, 65%, 66%, 67%, 68%, 69%, 70%, 71%, 72%, 73% 74%, 75%, 76%, 77%, 78%, 79%, 80%, 81%, 82%, 83%, 84%, 85%, 86%, 87%, 88%, 89%, 90%, 91%, 92%, 93%, 94%, 95%, 96%, 97%, 98%, 99%, or 100% as compared to binding affinity of a parent binary complex to the non-target locus.

[0740] In some embodiments, binding affinity of a plurality of variant binary complexes to two or more non-target loci (e.g., off-target binding affinity) is decreased by at least about 4%, 5%, 6%, 7%, 8%, 9%, 10%, 11%, 12%, 13%, 14%, 15%, 16%, 17%, 18%, 19%, 20%, 21%, 22%, 23%, 24%, 25%, 26%, 27%, 28%, 29%, 30%, 31%, 32%, 33%, 34%, 35%, 36%, 37%, 38%, 39%, 40%, 41%, 42%, 43%, 44%, 45%, 46%, 47%, 48%, 49%, 50%, 51%, 52%, 53%, 54%, 55%, 56%, 57%, 58%, 59%, 60%, 61%, 62%, 63%, 64%, 65%, 66%, 67%, 68%, 69%, 70%, 71%, 72%, 73% 74%, 75%, 76%, 77%, 78%, 79%, 80%, 81%, 82%, 83%, 84%, 85%, 86%, 87%, 88%, 89%, 90%, 91%, 92%, 93%, 94%, 95%, 96%, 97%, 98%, 99%, or 100% as compared to binding affinity of a plurality of parent binary complexes to the two or more non-target loci.

[0741] In some embodiments, binding affinity of a variant binary complex to a target locus (e.g., on-target binding affinity) is increased by at least about 4%, 5%, 6%, 7%, 8%, 9%, 10%, 11%, 12%, 13%, 14%, 15%, 16%, 17%, 18%, 19%, 20%, 21%, 22%, 23%, 24%, 25%, 26%, 27%, 28%, 29%, 30%, 31%, 32%, 33%, 34%, 35%, 36%, 37%, 38%, 39%, 40%, 41%, 42%, 43%, 44%, 45%, 46%, 47%, 48%, 49%, 50%, 51%, 52%, 53%, 54%, 55%, 56%, 57%, 58%, 59%, 60%, 61%, 62%, 63%, 64%, 65%, 66%, 67%, 68%, 69%, 70%, 71%, 72%, 73% 74%, 75%, 76%, 77%, 78%, 79%, 80%, 81%, 82%, 83%, 84%, 85%, 86%, 87%, 88%, 89%, 90%, 91%, 92%, 93%, 94%, 95%, 96%, 97%, 98%, 99%, 100%, 110%, 120%, 130%, 140%, 150%, 160%, 170%, 180%, 190%, 200% or more as compared to binding affinity of a parent binary complex to the target locus.

[0742] In some embodiments, binding affinity of a plurality of variant binary complexes to two or more target loci (e.g., on-target binding affinity) is increased by at least about 4%, 5%, 6%, 7%, 8%, 9%, 10%, 11%, 12%, 13%, 14%, 15%, 16%, 17%, 18%, 19%, 20%, 21%, 22%, 23%, 24%, 25%, 26%, 27%, 28%, 29%, 30%, 31%, 32%, 33%, 34%, 35%, 36%, 37%, 38%, 39%, 40%, 41%, 42%, 43%, 44%, 45%, 46%, 47%, 48%, 49%, 50%, 51%, 52%, 53%, 54%, 55%, 56%, 57%, 58%, 59%, 60%, 61%, 62%, 63%, 64%, 65%, 66%, 67%, 68%, 69%, 70%, 71%, 72%, 73% 74%, 75%, 76%, 77%, 78%, 79%, 80%, 81%, 82%, 83%, 84%, 85%, 86%, 87%, 88%, 89%, 90%, 91%, 92%, 93%, 94%, 95%, 96%, 97%, 98%, 99%, 100%, 110%, 120%, 130%, 140%, 150%, 160%, 170%, 180%, 190%, 200% or more as compared to binding affinity of a plurality of parent binary complexes to the two or more target loci.

[0743] In the context of the present invention, the degree of decreased off-target binding and/or increased on-target binding between a variant binary complex and a parent binary complex may differ by about 4%, 5%, 6%, 7%, 8%, 9%, 10%, 11%, 12%, 13%, 14%, 15%, 16%, 17%, 18%, 19%, 20%, 21%, 22%, 23%, 24%, 25%, 26%, 27%, 28%, 29%, 30%, 31%, 32%, 33%, 34%, 35%, 36%, 37%, 38%, 39%, 40%, 41%, 42%, 43%, 44%, 45%, 46%, 47%, 48%, 49%, 50%, 51%, 52%, 53%, 54%, 55%, 56%, 57%, 58%, 59%, 60%, 61%, 62%, 63%, 64%, 65%, 66%, 67%, 68%, 69%, 70%, 71%, 72%, 73% 74%, 75%, 76%, 77%, 78%, 79%, 80%, 81%, 82%, 83%, 84%, 85%, 86%, 87%, 88%, 89%, 90%, 91%, 92%, 93%, 94%, 95%, 96%, 97%, 98%, 99%, 100%, or more.

[0744] In some embodiments, off-target binding of a variant binary complex to a non-target locus is decreased by at least about 4%, 5%, 6%, 7%, 8%, 9%, 10%, 11%, 12%, 13%, 14%, 15%, 16%, 17%, 18%, 19%, 20%, 21%, 22%, 23%, 24%, 25%, 26%, 27%, 28%, 29%, 30%, 31%, 32%, 33%, 34%, 35%, 36%, 37%, 38%, 39%, 40%, 41%, 42%, 43%, 44%, 45%, 46%, 47%, 48%, 49%, 50%, 51%, 52%, 53%, 54%, 55%, 56%, 57%, 58%, 59%, 60%, 61%, 62%, 63%, 64%, 65%, 66%, 67%, 68%, 69%, 70%, 71%, 72%, 73% 74%, 75%, 76%, 77%, 78%, 79%, 80%, 81%, 82%, 83%, 84%, 85%, 86%, 87%, 88%, 89%, 90%, 91%, 92%, 93%, 94%, 95%, 96%, 97%, 98%, 99%, or 100% as compared to off-target binding of a parent binary complex to the non-target locus.

[0745] In some embodiments, off-target binding of a plurality of variant binary complexes to two or more non-target loci is decreased by at least about 4%, 5%, 6%, 7%, 8%, 9%, 10%, 11%, 12%, 13%, 14%, 15%, 16%, 17%, 18%, 19%, 20%, 21%, 22%, 23%, 24%, 25%, 26%, 27%, 28%, 29%, 30%, 31%, 32%, 33%, 34%, 35%, 36%, 37%, 38%, 39%, 40%, 41%, 42%, 43%, 44%, 45%, 46%, 47%, 48%, 49%, 50%, 51%, 52%, 53%, 54%, 55%, 56%, 57%, 58%, 59%, 60%, 61%, 62%, 63%, 64%, 65%, 66%, 67%, 68%, 69%, 70%, 71%, 72%, 73% 74%, 75%, 76%, 77%, 78%, 79%, 80%, 81%, 82%, 83%, 84%, 85%, 86%, 87%, 88%, 89%, 90%, 91%, 92%, 93%, 94%, 95%, 96%, 97%, 98%, 99%, or 100% as compared to off-target binding of a plurality of parent binary complexes to the two or more non-target loci.

[0746] In some embodiments, on-target binding of a variant binary complex to a target locus is increased by at least about 4%, 5%, 6%, 7%, 8%, 9%, 10%, 11%, 12%, 13%, 14%, 15%, 16%, 17%, 18%, 19%, 20%, 21%, 22%, 23%, 24%, 25%, 26%, 27%, 28%, 29%, 30%, 31%, 32%, 33%, 34%, 35%, 36%, 37%, 38%, 39%, 40%, 41%, 42%, 43%, 44%, 45%, 46%, 47%, 48%, 49%, 50%, 51%, 52%, 53%, 54%, 55%, 56%, 57%, 58%, 59%, 60%, 61%, 62%, 63%, 64%, 65%, 66%, 67%, 68%, 69%, 70%, 71%, 72%, 73% 74%, 75%, 76%, 77%, 78%, 79%, 80%, 81%, 82%, 83%, 84%, 85%, 86%, 87%, 88%, 89%, 90%, 91%, 92%, 93%, 94%, 95%, 96%, 97%, 98%, 99%, 100%, 110%, 120%, 130%, 140%, 150%, 160%, 170%, 180%, 190%, 200% or more as compared to on-target binding of a parent binary complex to the target locus.

[0747] In some embodiments, on-target binding of a plurality of variant binary complexes to two or more target loci is increased by at least about 4%, 5%, 6%, 7%, 8%, 9%, 10%, 11%, 12%, 13%, 14%, 15%, 16%, 17%, 18%, 19%, 20%, 21%, 22%, 23%, 24%, 25%, 26%, 27%, 28%, 29%, 30%, 31%, 32%, 33%, 34%, 35%, 36%, 37%, 38%, 39%, 40%, 41%, 42%, 43%, 44%, 45%, 46%, 47%, 48%, 49%, 50%, 51%, 52%, 53%, 54%, 55%, 56%, 57%, 58%, 59%, 60%, 61%, 62%, 63%, 64%, 65%, 66%, 67%, 68%, 69%, 70%, 71%, 72%, 73% 74%, 75%, 76%, 77%, 78%, 79%, 80%, 81%, 82%, 83%, 84%, 85%, 86%, 87%, 88%, 89%, 90%, 91%, 92%, 93%, 94%, 95%, 96%, 97%, 98%, 99%, 100%, 110%, 120%, 130%, 140%, 150%, 160%, 170%, 180%, 190%, 200% or more as compared to on-target binding of a plurality of parent binary complexes to the two or more target loci.

[0748] In some embodiments, increased binding affinity of a variant binary complex to a target locus (e.g., on-target binding affinity), as compared to a reference, is associated with decreased binding affinity of the variant binary complex to a non-target locus (e.g., off-target binding affinity), as compared to a reference. In some embodiments, binding affinity of a variant binary complex at a target locus (e.g., on-target binding affinity) is inversely associated with binding affinity of the variant binary complex at a non-target locus (e.g., off-target binding affinity). In some embodiments, increased binding affinity of a variant binary complex at a target locus by at least about 4%, 5%, 6%, 7%, 8%, 9%, 10%, 11%, 12%, 13%, 14%, 15%, 16%, 17%, 18%, 19%, 20%, 21%, 22%, 23%, 24%, 25%, 26%, 27%, 28%, 29%, 30%, 31%, 32%, 33%, 34%, 35%, 36%, 37%, 38%, 39%, 40%, 41%, 42%, 43%, 44%, 45%, 46%, 47%, 48%, 49%, 50%, 51%, 52%, 53%, 54%, 55%, 56%, 57%, 58%, 59%, 60%, 61%, 62%, 63%, 64%, 65%, 66%, 67%, 68%, 69%, 70%, 71%, 72%, 73% 74%, 75%, 76%, 77%, 78%, 79%, 80%, 81%, 82%, 83%, 84%, 85%, 86%, 87%, 88%, 89%, 90%, 91%, 92%, 93%, 94%, 95%, 96%, 97%, 98%, 99%, 100%, 110%, 120%, 130%, 140%, 150%, 160%, 170%, 180%, 190%, 200%, or more, as compared to a reference (e.g., on-target binding affinity by a parent binary complex), is associated with decreased binding affinity of the variant binary complex at a non-target locus by at least about 4%, 5%, 6%, 7%, 8%, 9%, 10%, 11%, 12%, 13%, 14%, 15%, 16%, 17%, 18%, 19%, 20%, 21%, 22%, 23%, 24%, 25%, 26%, 27%, 28%, 29%, 30%, 31%, 32%, 33%, 34%, 35%, 36%, 37%, 38%, 39%, 40%, 41%, 42%, 43%, 44%, 45%, 46%, 47%, 48%, 49%, 50%, 51%, 52%, 53%, 54%, 55%, 56%, 57%, 58%, 59%, 60%, 61%, 62%, 63%, 64%, 65%, 66%, 67%, 68%, 69%, 70%, 71%, 72%, 73% 74%, 75%, 76%, 77%, 78%, 79%, 80%, 81%, 82%, 83%, 84%, 85%, 86%, 87%, 88%, 89%, 90%, 91%, 92%, 93%, 94%, 95%, 96%, 97%, 98%, 99%, 100%, 110%, 120%, 130%, 140%, 150%, 160%, 170%, 180%, 190%, 200%, or more, as compared to a reference (e.g., off-target binding affinity by a parent binary complex). In some embodiments, increased binding affinity of a variant binary complex to a target locus (e.g., on-target binding affinity), as compared to a reference, results in increased binding affinity of the variant binary complex at the target locus (e.g., on-target binding affinity), as compared to a reference.

[0749] In some embodiments, increased binding affinity of a plurality of variant binary complexes to two or more target loci (e.g., on-target binding affinity), as compared to a reference, is associated with decreased binding affinity of the plurality of variant binary complexes to two or more non-target loci (e.g., off-target binding affinity), as compared to a reference. In some embodiments, binding affinity of a plurality of variant binary complexes at two or more target loci (e.g., on-target binding affinity) is inversely associated with binding affinity of the plurality of variant binary complexes at two or more non-target loci (e.g., off-target binding affinity). In some embodiments, increased binding affinity of a plurality of variant binary complexes at two or more target loci (e.g., on-target binding affinity) by at least about 4%, 5%, 6%, 7%, 8%, 9%, 10%, 11%, 12%, 13%, 14%, 15%, 16%, 17%, 18%, 19%, 20%, 21%, 22%, 23%, 24%, 25%, 26%, 27%, 28%, 29%, 30%, 31%, 32%, 33%, 34%, 35%, 36%, 37%, 38%, 39%, 40%, 41%, 42%, 43%, 44%, 45%, 46%, 47%, 48%, 49%, 50%, 51%, 52%, 53%, 54%, 55%, 56%, 57%, 58%, 59%, 60%, 61%, 62%, 63%, 64%, 65%, 66%, 67%, 68%, 69%, 70%, 71%, 72%, 73% 74%, 75%, 76%, 77%, 78%, 79%, 80%, 81%, 82%, 83%, 84%, 85%, 86%, 87%, 88%, 89%, 90%, 91%, 92%, 93%, 94%, 95%, 96%, 97%, 98%, 99%, 100%, 110%, 120%, 130%, 140%, 150%, 160%, 170%, 180%, 190%, 200%, or more, as compared to a reference (e.g., on-target binding affinity by a parent binary complex), is associated with decreased binding affinity of the plurality of variant binary complexes at two or more non-target loci (e.g., off-target binding affinity) by at least about 4%, 5%, 6%, 7%, 8%, 9%, 10%, 11%, 12%, 13%, 14%, 15%, 16%, 17%, 18%, 19%, 20%, 21%, 22%, 23%, 24%, 25%, 26%, 27%, 28%, 29%, 30%, 31%, 32%, 33%, 34%, 35%, 36%, 37%, 38%, 39%, 40%, 41%, 42%, 43%, 44%, 45%, 46%, 47%, 48%, 49%, 50%, 51%, 52%, 53%, 54%, 55%, 56%, 57%, 58%, 59%, 60%, 61%, 62%, 63%, 64%, 65%, 66%, 67%, 68%, 69%, 70%, 71%, 72%, 73% 74%, 75%, 76%, 77%, 78%, 79%, 80%, 81%, 82%, 83%, 84%, 85%, 86%, 87%, 88%, 89%, 90%, 91%, 92%, 93%, 94%, 95%, 96%, 97%, 98%, 99%, 100%, 110%, 120%, 130%, 140%, 150%, 160%, 170%, 180%, 190%, 200%, or more as compared to a reference (e.g., off-target binding affinity by a parent binary complex). In some embodiments, increased binding affinity of a plurality of variant binary complexes to two or more target loci (e.g., on-target binding affinity), as compared to a reference, results in decreased binding affinity of the plurality of variant binary complexes to two or more non-target loci (e.g., off-target binding affinity), as compared to a reference.

[0750] In some embodiments, increased binding of a variant binary complex to a target locus (e.g., on-target binding), as compared to a reference, is associated with decreased binding of the variant binary complex to a non-target locus (e.g., off-target binding), as compared to a reference. In some embodiments, binding of a variant binary complex at a target locus (e.g., on-target binding) is inversely associated with binding of the variant binary complex at a non-target locus (e.g., off-target binding). In some embodiments, increased binding of a variant binary complex at a target locus by at least about 4%, 5%, 6%, 7%, 8%, 9%, 10%, 11%, 12%, 13%, 14%, 15%, 16%, 17%, 18%, 19%, 20%, 21%, 22%, 23%, 24%, 25%, 26%, 27%, 28%, 29%, 30%, 31%, 32%, 33%, 34%, 35%, 36%, 37%, 38%, 39%, 40%, 41%, 42%, 43%, 44%, 45%, 46%, 47%, 48%, 49%, 50%, 51%, 52%, 53%, 54%, 55%, 56%, 57%, 58%, 59%, 60%, 61%, 62%, 63%, 64%, 65%, 66%, 67%, 68%, 69%, 70%, 71%, 72%, 73% 74%, 75%, 76%, 77%, 78%, 79%, 80%, 81%, 82%, 83%, 84%, 85%, 86%, 87%, 88%, 89%, 90%, 91%, 92%, 93%, 94%, 95%, 96%, 97%, 98%, 99%, 100%, 110%, 120%, 130%, 140%, 150%, 160%, 170%, 180%, 190%, 200%, or more, as compared to a reference (e.g., on-target binding by a parent binary complex), is associated with decreased binding of the variant binary complex at a non-target locus by at least about 4%, 5%, 6%, 7%, 8%, 9%, 10%, 11%, 12%, 13%, 14%, 15%, 16%, 17%, 18%, 19%, 20%, 21%, 22%, 23%, 24%, 25%, 26%, 27%, 28%, 29%, 30%, 31%, 32%, 33%, 34%, 35%, 36%, 37%, 38%, 39%, 40%, 41%, 42%, 43%, 44%, 45%, 46%, 47%, 48%, 49%, 50%, 51%, 52%, 53%, 54%, 55%, 56%, 57%, 58%, 59%, 60%, 61%, 62%, 63%, 64%, 65%, 66%, 67%, 68%, 69%, 70%, 71%, 72%, 73% 74%, 75%, 76%, 77%, 78%, 79%, 80%, 81%, 82%, 83%, 84%, 85%, 86%, 87%, 88%, 89%, 90%, 91%, 92%, 93%, 94%, 95%, 96%, 97%, 98%, 99%, 100%, 110%, 120%, 130%, 140%, 150%, 160%, 170%, 180%, 190%, 200%, or more, as compared to a reference (e.g., off-target binding by a parent binary complex). In some embodiments, increased binding of a variant binary complex to a target locus (e.g., on-target binding), as compared to a reference, results in decreased binding of the variant binary complex to a non-target locus (e.g., off-target binding), as compared to a reference.

[0751] In some embodiments, increased binding of a plurality of variant binary complexes to two or more target loci (e.g., on-target binding), as compared to a reference, is associated with decreased binding of the plurality of variant binary complexes to two or more non-target loci (e.g., off-target binding), as compared to a reference. In some embodiments, binding of a plurality of variant binary complexes at two or more target loci (e.g., on-target binding) is inversely associated with binding of the plurality of variant binary complexes at two or more non-target loci (e.g., off-target binding). In some embodiments, increased binding of a plurality of variant binary complexes at two or more target loci (on-target binding) by at least about 4%, 5%, 6%, 7%, 8%, 9%, 10%, 11%, 12%, 13%, 14%, 15%, 16%, 17%, 18%, 19%, 20%, 21%, 22%, 23%, 24%, 25%, 26%, 27%, 28%, 29%, 30%, 31%, 32%, 33%, 34%, 35%, 36%, 37%, 38%, 39%, 40%, 41%, 42%, 43%, 44%, 45%, 46%, 47%, 48%, 49%, 50%, 51%, 52%, 53%, 54%, 55%, 56%, 57%, 58%, 59%, 60%, 61%, 62%, 63%, 64%, 65%, 66%, 67%, 68%, 69%, 70%, 71%, 72%, 73% 74%, 75%, 76%, 77%, 78%, 79%, 80%, 81%, 82%, 83%, 84%, 85%, 86%, 87%, 88%, 89%, 90%, 91%, 92%, 93%, 94%, 95%, 96%, 97%, 98%, 99%, 100%, 110%, 120%, 130%, 140%, 150%, 160%, 170%, 180%, 190%, 200%, or more, as compared to a reference (e.g., on-target binding by a parent binary complex), is associated with decreased binding of the plurality of variant binary complexes at two or more non-target loci (e.g., off-target binding) by at least about 4%, 5%, 6%, 7%, 8%, 9%, 10%, 11%, 12%, 13%, 14%, 15%, 16%, 17%, 18%, 19%, 20%, 21%, 22%, 23%, 24%, 25%, 26%, 27%, 28%, 29%, 30%, 31%, 32%, 33%, 34%, 35%, 36%, 37%, 38%, 39%, 40%, 41%, 42%, 43%, 44%, 45%, 46%, 47%, 48%, 49%, 50%, 51%, 52%, 53%, 54%, 55%, 56%, 57%, 58%, 59%, 60%, 61%, 62%, 63%, 64%, 65%, 66%, 67%, 68%, 69%, 70%, 71%, 72%, 73% 74%, 75%, 76%, 77%, 78%, 79%, 80%, 81%, 82%, 83%, 84%, 85%, 86%, 87%, 88%, 89%, 90%, 91%, 92%, 93%, 94%, 95%, 96%, 97%, 98%, 99%, 100%, 110%, 120%, 130%, 140%, 150%, 160%, 170%, 180%, 190%, 200%, or more, as compared to a reference (e.g., off-target binding by a parent binary complex). In some embodiments, increased binding of a plurality of variant binary complexes to two or more target loci (e.g., on-target binding), as compared to a reference, results in decreased binding of the plurality of variant binary complexes to two or more non-target loci (e.g., off-target binding), as compared to a reference.

[0752] In some embodiments, increased binding affinity of a variant binary complex to a target locus is associated with increased activity of the variant binary complex at the target locus (e.g., on-target activity). In some embodiments, increased binding affinity of a variant binary complex to a target locus results in increased activity of the variant binary complex at the target locus (e.g., on-target activity).

[0753] In some embodiments, increased binding affinity of a plurality of variant binary complexes to two or more target loci is associated with increased activity of the plurality of variant binary complexes at the two or more target loci (e.g., on-target activity). In some embodiments, increased binding affinity of a plurality of variant binary complexes to two or more target loci results in increased activity of the plurality of variant binary complexes at the two or more target loci (e.g., on-target activity).

[0754] In some embodiments, increased binding of a variant binary complex to a target locus is associated with increased activity of the variant binary complex at the target locus (e.g., on-target activity). In some embodiments, increased binding of a variant binary complex to a target locus results in increased activity of the variant binary complex at the target locus (e.g., on-target activity).

[0755] In some embodiments, increased binding of a plurality of variant binary complexes to two or more target loci is associated with increased activity of the plurality of variant binary complexes at the two or more target loci (e.g., on-target activity). In some embodiments, increased binding of a plurality of variant binary complexes to two or more target loci results in increased activity of the plurality of variant binary complexes at the two or more target loci (e.g., on-target activity).

[0756] In some embodiments, decreased binding affinity of a variant binary complex to a non-target locus is associated with decreased activity of the variant binary complex at the non-target locus (e.g., off-target activity). In some embodiments, decreased binding affinity of a variant binary complex to a non-target locus results in decreased activity of the variant binary complex at the non-target locus (e.g., off-target activity).

[0757] In some embodiments, decreased binding affinity of a plurality of variant binary complexes to two or more non-target loci is associated with decreased activity of the plurality of variant binary complexes at the two or more non-target loci (e.g., off-target activity). In some embodiments, decreased binding affinity of a plurality of variant binary complexes to two or more non-target loci results in decreased activity of the plurality of variant binary complexes at the two or more non-target loci (e.g., off-target activity).

[0758] In some embodiments, decreased binding of a variant binary complex to a non-target locus is associated with decreased activity of the variant binary complex at the non-target locus (e.g., off-target activity). In some embodiments, decreased binding of a variant binary complex to a non-target locus results in decreased activity of the variant binary complex at the non-target locus (e.g., off-target activity).

[0759] In some embodiments, decreased binding of a plurality of variant binary complexes to two or more non-target loci is associated with decreased activity of the plurality of variant binary complexes at the two or more non-target loci (e.g., off-target activity). In some embodiments, decreased binding of a plurality of variant binary complexes to two or more non-target loci results in decreased activity of the plurality of variant binary complexes at the two or more non-target loci (e.g., off-target activity).

[0760] In some embodiments, decreased binding affinity of a variant binary complex to a non-target locus is associated with increased activity of the variant binary complex at a target locus (e.g., on-target activity). In some embodiments, decreased binding affinity of a variant binary complex to a non-target locus results in increased activity of the variant binary complex at a non-target locus (e.g., on-target activity).

[0761] In some embodiments, decreased binding affinity of a plurality of variant binary complexes to two or more non-target loci is associated with increased activity of the plurality of variant binary complexes at two or more on-target loci (e.g., on-target activity). In some embodiments, decreased binding affinity of a plurality of variant binary complexes to two or more non-target loci results in increased activity of the plurality of variant binary complexes at two or more on-target loci (e.g., on-target activity).

[0762] In some embodiments, decreased binding of a variant binary complex to a non-target locus is associated with increased activity of the variant binary complex at an on-target locus (e.g., on-target activity). In some embodiments, decreased binding of a variant binary complex to a non-target locus results in increased activity of the variant binary complex at an on-target locus (e.g., on-target activity).

[0763] In some embodiments, decreased binding of a plurality of variant binary complexes to two or more non-target loci is associated with increased activity of the plurality of variant binary complexes at two or more on-target loci (e.g., on-target activity). In some embodiments, decreased binding of a plurality of variant binary complexes to two or more non-target loci results in increased activity of the plurality of variant binary complexes at two or more non-target loci (e.g., on-target activity).

[0764] In some embodiments, binding affinity of a variant binary complex to a target locus is associated with a ratio of on-target activity (e.g., at the target locus) to off-target activity (e.g., at a non-target locus) of the variant binary complex, as compared to a parent binary complex. In some embodiments, increased binding affinity of a variant binary complex to a target locus is associated with and/or results in an increased ratio of on-target activity (e.g., at the target locus) to off-target activity (e.g., at a non-target locus) of the variant binary complex, as compared to a parent binary complex.

[0765] In some embodiments, binding affinity of a plurality of variant binary complexes to two or more target loci is associated with a ratio of on-target activity (e.g., at the two or more target loci) to off-target activity (e.g., at two or more non-target loci) of the plurality of variant binary complexes, as compared to a plurality of parent binary complexes. In some embodiments, increased binding affinity of a plurality of variant binary complexes to two or more target loci is associated with and/or results in an increased ratio of on-target activity (e.g., at the two or more target loci) to off-target activity (e.g., at two or more non-target loci) of the plurality of variant binary complexes, as compared to a plurality of parent binary complexes.

[0766] In some embodiments, binding of a variant binary complex to a target locus is associated with a ratio of on-target activity (e.g., at the target locus) to off-target activity (e.g., at a non-target locus) of the variant binary complex, as compared to a parent binary complex. In some embodiments, increased binding of a variant binary complex to a target locus is associated with and/or results in an increased ratio of on-target activity (e.g., at the target locus) to off-target activity (e.g., at a non-target locus) of the variant binary complex, as compared to a parent binary complex.

[0767] In some embodiments, binding of a plurality of variant binary complexes to two or more target loci is associated with a ratio of on-target activity (e.g., at the two or more target loci) to off-target activity (e.g., at two or more non-target loci) of the plurality of variant binary complexes, as compared to a plurality of parent binary complexes. In some embodiments, increased binding of a plurality of variant binary complexes to two or more target loci is associated with and/or results in an increased ratio of on-target activity (e.g., at the two or more target loci) to off-target activity (e.g., at two or more non-target loci) of the plurality of variant binary complexes, as compared to a plurality of parent binary complexes.

[0768] In some embodiments, a ratio of on-target binding affinity to off-target binding affinity for a variant binary complex is associated with on-target activity (e.g., at a target locus), as compared to a parent binary complex. In some embodiments, an increased ratio of on-target binding affinity to off-target binding affinity for a variant binary complex is associated with and/or results in increased on-target activity (e.g., at a target locus), as compared to a parent binary complex.

[0769] In some embodiments, a ratio of on-target binding affinity to off-target binding affinity for a plurality of variant binary complexes is associated with on-target activity (e.g., at two or more target loci), as compared to a plurality of parent binary complexes. In some embodiments, an increased ratio of on-target binding affinity to off-target binding affinity for a plurality of variant binary complexes is associated with and/or results in increased on-target activity (e.g., at two or more target loci), as compared to a plurality of parent binary complexes.

[0770] In some embodiments, a ratio of on-target binding to off-target binding for a variant binary complex is associated with on-target activity (e.g., at a target locus), as compared to a parent binary complex. In some embodiments, an increased ratio of on-target binding to off-target binding for a variant binary complex is associated with and/or results in increased on-target activity (e.g., at a target locus), as compared to a parent binary complex.

[0771] In some embodiments, a ratio of on-target binding to off-target binding for a plurality of variant binary complexes is associated with on-target activity (e.g., at two or more target loci), as compared to a plurality of parent binary complexes. In some embodiments, an increased ratio of on-target binding to off-target binding for a plurality of variant binary complexes is associated with and/or results in increased on-target activity (e.g., at two or more target loci), as compared to a plurality of parent binary complexes.

### Indel Activity

[0772] In some embodiments, the variant binary complex, variant ternary complex formation, or on-target binding of a variant complex induces a DNA break that results in a deletion (e.g., a nucleotide deletion or DNA deletion) adjacent to a 5′-NTTN-3′ sequence, wherein N is any nucleotide. In some embodiments, the on-target binding of a variant complex results in a deletion adjacent to a 5′-NTTY-3′, 5′-NTTC-3′, 5′-NTTT-3′, 5′-NTTA-3′, 5′-NTTB-3′, 5′-NTTG-3′, 5′-CTTY-3′, 5‘-DTTR’3′, 5′-CTTR-3′, 5′-DTTT-3′, 5′-ATTN-3′, or 5′-GTTN-3′ sequence, wherein Y is C or T, B is any nucleotide except for A, D is any nucleotide except for C, and R is A or G. In some embodiments, the on-target binding of a variant complex results in a deletion adjacent to a 5′-CTTT-3′, 5′-CTTC-3′, 5′-GTTT-3′, 5′-GTTC-3′, 5′-TTTC-3′, 5′-GTTA-3′, or 5′-GTTG-3′ sequence. In some embodiments, the variant binary complex, variant ternary complex formation, or on-target binding of a variant complex results in a deletion adjacent to a T/C-rich sequence.

[0773] In some embodiments, the variant binary complex, variant ternary complex formation, or on-target binding of a variant complex results in a deletion downstream of a 5′-NTTN-3′ sequence. In some embodiments, the variant binary complex, variant ternary complex formation, or on-target binding of a variant complex results in a deletion downstream of a 5′-NTTY-3′, 5′-NTTC-3′, 5′-NTTT-3′, 5′-NTTA-3′, 5′-NTTB-3′, 5′-NTTG-3′, 5′-CTTY-3′, 5‘-DTTR’3′, 5′-CTTR-3′, 5′-DTTT-3′, 5′-ATTN-3′, or 5′-GTTN-3′ sequence. In some embodiments, the variant binary complex, variant ternary complex formation, or on-target binding of a variant complex results in a deletion downstream of a 5′-CTTT-3′, 5′-CTTC-3′, 5′-GTTT-3′, 5′-GTTC-3′, 5′-TTTC-3′, 5′-GTTA-3′, or 5′-GTTG-3′ sequence. In some embodiments, the variant binary complex, variant ternary complex formation, or on-target binding of a variant complex results in a deletion downstream of a T/C-rich sequence.

[0774] In some embodiments, the deletion starts within about 5 to about 15 nucleotides (e.g., about 3, 4, 5, 6, 7, 8, 9, 10, 11, 12, 13, 14, 15, 16, or 17 nucleotides) of the 5′-NTTN-3′ sequence. In some embodiments, the deletion starts within about 5 to about 15 nucleotides (e.g., about 3, 4, 5, 6, 7, 8, 9, 10, 11, 12, 13, 14, 15, 16, or 17 nucleotides) of a 5′-NTTY-3′, 5′-NTTC-3′, 5′-NTTT-3′, 5′-NTTA-3′, 5′-NTTB-3′, 5′-NTTG-3′, 5′-CTTY-3′, 5‘-DTTR’3′, 5′-CTTR-3′, 5′-DTTT-3′, 5′-ATTN-3′, or 5′-GTTN-3′ sequence. In some embodiments, the deletion starts within about 5 to about 15 nucleotides (e.g., about 3, 4, 5, 6, 7, 8, 9, 10, 11, 12, 13, 14, 15, 16, or 17 nucleotides) of a 5′-CTTT-3′, 5′-CTTC-3′, 5′-GTTT-3′, 5′-GTTC-3′, 5′-TTTC-3′, 5′-GTTA-3′, or 5′-GTTG-3′ sequence. In some embodiments, the deletion starts within about 5 to about 15 nucleotides (e.g., about 3, 4, 5, 6, 7, 8, 9, 10, 11, 12, 13, 14, 15, 16, or 17 nucleotides) of a T/C-rich sequence.

[0775] In some embodiments, the deletion starts within about 5 to about 15 nucleotides (e.g., about 3, 4, 5, 6, 7, 8, 9, 10, 11, 12, 13, 14, 15, 16, or 17 nucleotides) downstream of the 5′-NTTN-3′ sequence. In some embodiments, the deletion starts within about 5 to about 15 nucleotides (e.g., about 3, 4, 5, 6, 7, 8, 9, 10, 11, 12, 13, 14, 15, 16, or 17 nucleotides) downstream of a 5′-NTTY-3′, 5′-NTTC-3′, 5′-NTTT-3′, 5′-NTTA-3′, 5′-NTTB-3′, 5′-NTTG-3′, 5′-CTTY-3′, 5‘-DTTR’3′, 5′-CTTR-3′, 5′-DTTT-3′, 5′-ATTN-3′, or 5′-GTTN-3′ sequence. In some embodiments, the deletion starts within about 5 to about 15 nucleotides (e.g., about 3, 4, 5, 6, 7, 8, 9, 10, 11, 12, 13, 14, 15, 16, or 17 nucleotides) downstream of a 5′-CTTT-3′, 5′-CTTC-3′, 5′-GTTT-3′, 5′-GTTC-3′, 5′-TTTC-3′, 5′-GTTA-3′, or 5′-GTTG-3′ sequence. In some embodiments, the deletion starts within about 5 to about 15 nucleotides (e.g., about 3, 4, 5, 6, 7, 8, 9, 10, 11, 12, 13, 14, 15, 16, or 17 nucleotides) downstream of a T/C-rich sequence.

[0776] In some embodiments, the deletion starts within about 5 to about 10 nucleotides (e.g., about 3, 4, 5, 6, 7, 8, 9, 10, 11, or 12 nucleotides) of the 5′-NTTN-3′ sequence. In some embodiments, the deletion starts within about 5 to about 10 nucleotides (e.g., about 3, 4, 5, 6, 7, 8, 9, 10, 11, or 12 nucleotides) of a 5′-NTTY-3′, 5′-NTTC-3′, 5′-NTTT-3′, 5′-NTTA-3′, 5′-NTTB-3′, 5′-NTTG-3′, 5′-CTTY-3′, 5‘-DTTR’3′, 5′-CTTR-3′, 5′-DTTT-3′, 5′-ATTN-3′, or 5′-GTTN-3′ sequence. In some embodiments, the deletion starts within about 5 to about 10 nucleotides (e.g., about 3, 4, 5, 6, 7, 8, 9, 10, 11, or 12 nucleotides) of a 5′-CTTT-3′, 5′-CTTC-3′, 5′-GTTT-3′, 5′-GTTC-3′, 5′-TTTC-3′, 5′-GTTA-3′, or 5′-GTTG-3′ sequence. In some embodiments, the deletion starts within about 5 to about 10 nucleotides (e.g., about 3, 4, 5, 6, 7, 8, 9, 10, 11, or 12 nucleotides) of a T/C-rich sequence.

[0777] In some embodiments, the deletion starts within about 5 to about 10 nucleotides (e.g., about 3, 4, 5, 6, 7, 8, 9, 10, 11, or 12 nucleotides) downstream of the 5′-NTTN-3′ sequence. In some embodiments, the deletion starts within about 5 to about 10 nucleotides (e.g., about 3, 4, 5, 6, 7, 8, 9, 10, 11, or 12 nucleotides) downstream of a 5′-NTTY-3′, 5′-NTTC-3′, 5′-NTTT-3′, 5′-NTTA-3′, 5′-NTTB-3′, 5′-NTTG-3′, 5′-CTTY-3′, 5‘-DTTR’3′, 5′-CTTR-3′, 5′-DTTT-3′, 5′-ATTN-3′, or 5′-GTTN-3′ sequence. In some embodiments, the deletion starts within about 5 to about 10 nucleotides (e.g., about 3, 4, 5, 6, 7, 8, 9, 10, 11, or 12 nucleotides) downstream of a 5′-CTTT-3′, 5′-CTTC-3′, 5′-GTTT-3′, 5′-GTTC-3′, 5′-TTTC-3′, 5′-GTTA-3′, or 5′-GTTG-3′ sequence. In some embodiments, the deletion starts within about 5 to about 10 nucleotides (e.g., about 3, 4, 5, 6, 7, 8, 9, 10, 11, or 12 nucleotides) downstream of a T/C-rich sequence.

[0778] In some embodiments, the deletion starts within about 10 to about 15 nucleotides (e.g., about 8, 9, 10, 11, 12, 13, 14, 15, 16, or 17 nucleotides) of the 5′-NTTN-3′ sequence. In some embodiments, the deletion starts within about 10 to about 15 nucleotides (e.g., about 8, 9, 10, 11, 12, 13, 14, 15, 16, or 17 nucleotides) of a 5′-NTTY-3′, 5′-NTTC-3′, 5′-NTTT-3′, 5′-NTTA-3′, 5′-NTTB-3′, 5′-NTTG-3′, 5′-CTTY-3′, 5‘-DTTR’3′, 5′-CTTR-3′, 5′-DTTT-3′, 5′-ATTN-3′, or 5′-GTTN-3′ sequence. In some embodiments, the deletion starts within about 10 to about 15 nucleotides (e.g., about 8, 9, 10, 11, 12, 13, 14, 15, 16, or 17 nucleotides) of a 5′-CTTT-3′, 5′-CTTC-3′, 5′-GTTT-3′, 5′-GTTC-3′, 5′-TTTC-3′, 5′-GTTA-3′, or 5′-GTTG-3′ sequence. In some embodiments, the deletion starts within about 10 to about 15 nucleotides (e.g., about 8, 9, 10, 11, 12, 13, 14, 15, 16, or 17 nucleotides) of a T/C-rich sequence.

[0779] In some embodiments, the deletion starts within about 10 to about 15 nucleotides (e.g., about 8, 9, 10, 11, 12, 13, 14, 15, 16, or 17 nucleotides) downstream of the 5′-NTTN-3′ sequence. In some embodiments, the deletion starts within about 10 to about 15 nucleotides (e.g., about 8, 9, 10, 11, 12, 13, 14, 15, 16, or 17 nucleotides) downstream of a 5′-NTTY-3′, 5′-NTTC-3′, 5′-NTTT-3′, 5′-NTTA-3′, 5′-NTTB-3′, 5′-NTTG-3′, 5′-CTTY-3′, 5‘-DTTR’3′, 5′-CTTR-3′, 5′-DTTT-3′, 5′-ATTN-3′, or 5′-GTTN-3′ sequence. In some embodiments, the deletion starts within about 10 to about 15 nucleotides (e.g., about 8, 9, 10, 11, 12, 13, 14, 15, 16, or 17 nucleotides) downstream of a 5′-CTTT-3′, 5′-CTTC-3′, 5′-GTTT-3′, 5′-GTTC-3′, 5′-TTTC-3′, 5′-GTTA-3′, or 5′-GTTG-3′ sequence. In some embodiments, the deletion starts within about 10 to about 15 nucleotides (e.g., about 8, 9, 10, 11, 12, 13, 14, 15, 16, or 17 nucleotides) downstream of a T/C-rich sequence.

[0780] In some embodiments, the deletion ends within about 20 to about 30 nucleotides (e.g., about 17, 18, 19, 20, 21, 22, 23, 24, 25, 26, 27, 28, 29, 30, 31, 32, or 33 nucleotides) of the 5′-NTTN-3′ sequence. In some embodiments, the deletion ends within about 20 to about 30 nucleotides (e.g., about 17, 18, 19, 20, 21, 22, 23, 24, 25, 26, 27, 28, 29, 30, 31, 32, or 33 nucleotides) of a 5′-NTTY-3′, 5′-NTTC-3′, 5′-NTTT-3′, 5′-NTTA-3′, 5′-NTTB-3′, 5′-NTTG-3′, 5′-CTTY-3′, 5‘-DTTR’3′, 5′-CTTR-3′, 5′-DTTT-3′, 5′-ATTN-3′, or 5′-GTTN-3′ sequence. In some embodiments, the deletion ends within about 20 to about 30 nucleotides (e.g., about 17, 18, 19, 20, 21, 22, 23, 24, 25, 26, 27, 28, 29, 30, 31, 32, or 33 nucleotides) of a 5′-CTTT-3′, 5′-CTTC-3′, 5′-GTTT-3′, 5′-GTTC-3′, 5′-TTTC-3′, 5′-GTTA-3′, or 5′-GTTG-3′ sequence. In some embodiments, the deletion ends within about 20 to about 30 nucleotides (e.g., about 17, 18, 19, 20, 21, 22, 23, 24, 25, 26, 27, 28, 29, 30, 31, 32, or 33 nucleotides) of a T/C-rich sequence.

[0781] In some embodiments, the deletion ends within about 20 to about 30 nucleotides (e.g., about 17, 18, 19, 20, 21, 22, 23, 24, 25, 26, 27, 28, 29, 30, 31, 32, or 33 nucleotides) downstream of the 5′-NTTN-3′ sequence. In some embodiments, the deletion ends within about 20 to about 30 nucleotides (e.g., about 17, 18, 19, 20, 21, 22, 23, 24, 25, 26, 27, 28, 29, 30, 31, 32, or 33 nucleotides) downstream of a 5′-NTTY-3′, 5′-NTTC-3′, 5′-NTTT-3′, 5′-NTTA-3′, 5′-NTTB-3′, 5′-NTTG-3′, 5′-CTTY-3′, 5‘-DTTR’3′, 5′-CTTR-3′, 5′-DTTT-3′, 5′-ATTN-3′, or 5′-GTTN-3′ sequence. In some embodiments, the deletion ends within about 20 to about 30 nucleotides (e.g., about 17, 18, 19, 20, 21, 22, 23, 24, 25, 26, 27, 28, 29, 30, 31, 32, or 33 nucleotides) downstream of a 5′-CTTT-3′, 5′-CTTC-3′, 5′-GTTT-3′, 5′-GTTC-3′, 5′-TTTC-3′, 5′-GTTA-3′, or 5′-GTTG-3′ sequence. In some embodiments, the deletion ends within about 20 to about 30 nucleotides (e.g., about 17, 18, 19, 20, 21, 22, 23, 24, 25, 26, 27, 28, 29, 30, 31, 32, or 33 nucleotides) downstream of a T/C-rich sequence.

[0782] In some embodiments, the deletion ends within about 20 to about 25 nucleotides (e.g., about 17, 18, 19, 20, 21, 22, 23, 24, 25, 26, 27, or 28 nucleotides) of the 5′-NTTN-3′ sequence. In some embodiments, the deletion ends within about 20 to about 25 nucleotides (e.g., about 17, 18, 19, 20, 21, 22, 23, 24, 25, 26, 27, or 28 nucleotides) of a 5′-NTTY-3′, 5′-NTTC-3′, 5′-NTTT-3′, 5′-NTTA-3′, 5′-NTTB-3′, 5′-NTTG-3′, 5′-CTTY-3′, 5‘-DTTR’3′, 5′-CTTR-3′, 5′-DTTT-3′, 5′-ATTN-3′, or 5′-GTTN-3′ sequence. In some embodiments, the deletion ends within about 20 to about 25 nucleotides (e.g., about 17, 18, 19, 20, 21, 22, 23, 24, 25, 26, 27, or 28 nucleotides) of a 5′-CTTT-3′, 5′-CTTC-3′, 5′-GTTT-3′, 5′-GTTC-3′, 5′-TTTC-3′, 5′-GTTA-3′, or 5′-GTTG-3′ sequence. In some embodiments, the deletion ends within about 20 to about 25 nucleotides (e.g., about 17, 18, 19, 20, 21, 22, 23, 24, 25, 26, 27, or 28 nucleotides) of a T/C-rich sequence.

[0783] In some embodiments, the deletion ends within about 20 to about 25 nucleotides (e.g., about 17, 18, 19, 20, 21, 22, 23, 24, 25, 26, 27, or 28 nucleotides) downstream of the 5′-NTTN-3′ sequence. In some embodiments, the deletion ends within about 20 to about 25 nucleotides (e.g., about 17, 18, 19, 20, 21, 22, 23, 24, 25, 26, 27, or 28 nucleotides) downstream of a 5′-NTTY-3′, 5′-NTTC-3′, 5′-NTTT-3′, 5′-NTTA-3′, 5′-NTTB-3′, 5′-NTTG-3′, 5′-CTTY-3′, 5‘-DTTR’3′, 5′-CTTR-3′, 5′-DTTT-3′, 5′-ATTN-3′, or 5′-GTTN-3′ sequence. In some embodiments, the deletion ends within about 20 to about 25 nucleotides (e.g., about 17, 18, 19, 20, 21, 22, 23, 24, 25, 26, 27, or 28 nucleotides) downstream of a 5′-CTTT-3′, 5′-CTTC-3′, 5′-GTTT-3′, 5′-GTTC-3′, 5′-TTTC-3′, 5′-GTTA-3′, or 5′-GTTG-3′ sequence. In some embodiments, the deletion ends within about 20 to about 25 nucleotides (e.g., about 17, 18, 19, 20, 21, 22, 23, 24, 25, 26, 27, or 28 nucleotides) downstream of a T/C-rich sequence.

[0784] In some embodiments, the deletion ends within about 25 to about 30 nucleotides (e.g., about 22, 23, 24, 25, 26, 27, 28, 29, 30, 31, 32, or 33 nucleotides) of the 5′-NTTN-3′ sequence. In some embodiments, the deletion ends within about 25 to about 30 nucleotides (e.g., about 22, 23, 24, 25, 26, 27, 28, 29, 30, 31, 32, or 33 nucleotides) of a 5′-NTTY-3′, 5′-NTTC-3′, 5′-NTTT-3′, 5′-NTTA-3′, 5′-NTTB-3′, 5′-NTTG-3′, 5′-CTTY-3′, 5‘-DTTR’3′, 5′-CTTR-3′, 5′-DTTT-3′, 5′-ATTN-3′, or 5′-GTTN-3′ sequence. In some embodiments, the deletion ends within about 25 to about 30 nucleotides (e.g., about 22, 23, 24, 25, 26, 27, 28, 29, 30, 31, 32, or 33 nucleotides) of a 5′-CTTT-3′, 5′-CTTC-3′, 5′-GTTT-3′, 5′-GTTC-3′, 5′-TTTC-3′, 5′-GTTA-3′, or 5′-GTTG-3′ sequence. In some embodiments, the deletion ends within about 25 to about 30 nucleotides (e.g., about 22, 23, 24, 25, 26, 27, 28, 29, 30, 31, 32, or 33 nucleotides) of a T/C-rich sequence.

[0785] In some embodiments, the deletion ends within about 25 to about 30 nucleotides (e.g., about 22, 23, 24, 25, 26, 27, 28, 29, 30, 31, 32, or 33 nucleotides) downstream of the 5′-NTTN-3′ sequence. In some embodiments, the deletion ends within about 25 to about 30 nucleotides (e.g., about 22, 23, 24, 25, 26, 27, 28, 29, 30, 31, 32, or 33 nucleotides) downstream of a 5′-NTTY-3′, 5′-NTTC-3′, 5′-NTTT-3′, 5′-NTTA-3′, 5′-NTTB-3′, 5′-NTTG-3′, 5′-CTTY-3′, 5‘-DTTR’3′, 5′-CTTR-3′, 5′-DTTT-3′, 5′-ATTN-3′, or 5′-GTTN-3′ sequence. In some embodiments, the deletion ends within about 25 to about 30 nucleotides (e.g., about 22, 23, 24, 25, 26, 27, 28, 29, 30, 31, 32, or 33 nucleotides) downstream of a 5′-CTTT-3′, 5′-CTTC-3′, 5′-GTTT-3′, 5′-GTTC-3′, 5′-TTTC-3′, 5′-GTTA-3′, or 5′-GTTG-3′ sequence. In some embodiments, the deletion ends within about 25 to about 30 nucleotides (e.g., about 22, 23, 24, 25, 26, 27, 28, 29, 30, 31, 32, or 33 nucleotides) downstream of a T/C-rich sequence.

[0786] In some embodiments, the deletion starts within about 5 to about 15 nucleotides (e.g., about 3, 4, 5, 6, 7, 8, 9, 10, 11, 12, 13, 14, 15, 16, or 17 nucleotides) and ends within about 20 to about 30 nucleotides (e.g., about 17, 18, 19, 20, 21, 22, 23, 24, 25, 26, 27, 28, 29, 30, 31, 32, or 33 nucleotides) of the 5′-NTTN-3′ sequence. In some embodiments, the deletion starts within about 5 to about 15 nucleotides (e.g., about 3, 4, 5, 6, 7, 8, 9, 10, 11, 12, 13, 14, 15, 16, or 17 nucleotides) and ends within about 20 to about 30 nucleotides (e.g., about 17, 18, 19, 20, 21, 22, 23, 24, 25, 26, 27, 28, 29, 30, 31, 32, or 33 nucleotides) of a 5′-NTTY-3′, 5′-NTTC-3′, 5′-NTTT-3′, 5′-NTTA-3′, 5′-NTTB-3′, 5′-NTTG-3′, 5′-CTTY-3′, 5‘-DTTR’3′, 5′-CTTR-3′, 5′-DTTT-3′, 5′-ATTN-3′, or 5′-GTTN-3′ sequence. In some embodiments, the deletion starts within about 5 to about 15 nucleotides (e.g., about 3, 4, 5, 6, 7, 8, 9, 10, 11, 12, 13, 14, 15, 16, or 17 nucleotides) and ends within about 20 to about 30 nucleotides (e.g., about 17, 18, 19, 20, 21, 22, 23, 24, 25, 26, 27, 28, 29, 30, 31, 32, or 33 nucleotides) of a 5′-CTTT-3′, 5′-CTTC-3′, 5′-GTTT-3′, 5′-GTTC-3′, 5′-TTTC-3′, 5′-GTTA-3′, or 5′-GTTG-3′ sequence. In some embodiments, the deletion starts within about 5 to about 15 nucleotides (e.g., about 3, 4, 5, 6, 7, 8, 9, 10, 11, 12, 13, 14, 15, 16, or 17 nucleotides) and ends within about 20 to about 30 nucleotides (e.g., about 17, 18, 19, 20, 21, 22, 23, 24, 25, 26, 27, 28, 29, 30, 31, 32, or 33 nucleotides) of a T/C-rich sequence.

[0787] In some embodiments, the deletion starts within about 5 to about 15 nucleotides (e.g., about 3, 4, 5, 6, 7, 8, 9, 10, 11, 12, 13, 14, 15, 16, or 17 nucleotides) downstream of the 5′-NTTN-3′ sequence and ends within about 20 to about 30 nucleotides (e.g., about 17, 18, 19, 20, 21, 22, 23, 24, 25, 26, 27, 28, 29, 30, 31, 32, or 33 nucleotides) downstream of the 5′-NTTN-3′ sequence. In some embodiments, the deletion starts within about 5 to about 15 nucleotides (e.g., about 3, 4, 5, 6, 7, 8, 9, 10, 11, 12, 13, 14, 15, 16, or 17 nucleotides) downstream of a 5′-NTTY-3′, 5′-NTTC-3′, 5′-NTTT-3′, 5′-NTTA-3′, 5′-NTTB-3′, 5′-NTTG-3′, 5′-CTTY-3′, 5‘-DTTR’3′, 5′-CTTR-3′, 5′-DTTT-3′, 5′-ATTN-3′, or 5′-GTTN-3′ sequence and ends within about 20 to about 30 nucleotides (e.g., about 17, 18, 19, 20, 21, 22, 23, 24, 25, 26, 27, 28, 29, 30, 31, 32, or 33 nucleotides) downstream of the 5′-NTTY-3′, 5′-NTTC-3′, 5′-NTTT-3′, 5′-NTTA-3′, 5′-NTTB-3′, 5′-NTTG-3′, 5′-CTTY-3′, 5‘-DTTR’3′, 5′-CTTR-3′, 5′-DTTT-3′, 5′-ATTN-3′, or 5′-GTTN-3′ sequence. In some embodiments, the deletion starts within about 5 to about 15 nucleotides (e.g., about 3, 4, 5, 6, 7, 8, 9, 10, 11, 12, 13, 14, 15, 16, or 17 nucleotides) downstream of a 5′-CTTT-3′, 5′-CTTC-3′, 5′-GTTT-3′, 5′-GTTC-3′, 5′-TTTC-3′, 5′-GTTA-3′, or 5′-GTTG-3′ sequence and ends within about 20 to about 30 nucleotides (e.g., about 17, 18, 19, 20, 21, 22, 23, 24, 25, 26, 27, 28, 29, 30, 31, 32, or 33 nucleotides) downstream of the 5′-CTTT-3′, 5′-CTTC-3′, 5′-GTTT-3′, 5′-GTTC-3′, 5′-TTTC-3′, 5′-GTTA-3′, or 5′-GTTG-3′ sequence. In some embodiments, the deletion starts within about 5 to about 15 nucleotides (e.g., about 3, 4, 5, 6, 7, 8, 9, 10, 11, 12, 13, 14, 15, 16, or 17 nucleotides) downstream of a T/C-rich sequence and ends within about 20 to about 30 nucleotides (e.g., about 17, 18, 19, 20, 21, 22, 23, 24, 25, 26, 27, 28, 29, 30, 31, 32, or 33 nucleotides) downstream of the T/C-rich sequence.

[0788] In some embodiments, the deletion starts within about 5 to about 15 nucleotides (e.g., about 3, 4, 5, 6, 7, 8, 9, 10, 11, 12, 13, 14, 15, 16, or 17 nucleotides) and ends within about 20 to about 25 nucleotides (e.g., about 17, 18, 19, 20, 21, 22, 23, 24, 25, 26, 27, or 28 nucleotides) of the 5′-NTTN-3′ sequence. In some embodiments, the deletion starts within about 5 to about 15 nucleotides (e.g., about 3, 4, 5, 6, 7, 8, 9, 10, 11, 12, 13, 14, 15, 16, or 17 nucleotides) and ends within about 20 to about 25 nucleotides (e.g., about 17, 18, 19, 20, 21, 22, 23, 24, 25, 26, 27, or 28 nucleotides) of a 5′-NTTY-3′, 5′-NTTC-3′, 5′-NTTT-3′, 5′-NTTA-3′, 5′-NTTB-3′, 5′-NTTG-3′, 5′-CTTY-3′, 5‘-DTTR’3′, 5′-CTTR-3′, 5′-DTTT-3′, 5′-ATTN-3′, or 5′-GTTN-3′ sequence. In some embodiments, the deletion starts within about 5 to about 15 nucleotides (e.g., about 3, 4, 5, 6, 7, 8, 9, 10, 11, 12, 13, 14, 15, 16, or 17 nucleotides) and ends within about 20 to about 25 nucleotides (e.g., about 17, 18, 19, 20, 21, 22, 23, 24, 25, 26, 27, or 28 nucleotides) of a 5′-CTTT-3′, 5′-CTTC-3′, 5′-GTTT-3′, 5′-GTTC-3′, 5′-TTTC-3′, 5′-GTTA-3′, or 5′-GTTG-3′ sequence. In some embodiments, the deletion starts within about 5 to about 15 nucleotides (e.g., about 3, 4, 5, 6, 7, 8, 9, 10, 11, 12, 13, 14, 15, 16, or 17 nucleotides) and ends within about 20 to about 25 nucleotides (e.g., about 17, 18, 19, 20, 21, 22, 23, 24, 25, 26, 27, or 28 nucleotides) of a T/C-rich sequence.

[0789] In some embodiments, the deletion starts within about 5 to about 15 nucleotides (e.g., about 3, 4, 5, 6, 7, 8, 9, 10, 11, 12, 13, 14, 15, 16, or 17 nucleotides) downstream of the 5′-NTTN-3′ sequence and ends within about 20 to about 25 nucleotides (e.g., about 17, 18, 19, 20, 21, 22, 23, 24, 25, 26, 27, or 28 nucleotides) downstream of the 5′-NTTN-3′ sequence. In some embodiments, the deletion starts within about 5 to about 15 nucleotides (e.g., about 3, 4, 5, 6, 7, 8, 9, 10, 11, 12, 13, 14, 15, 16, or 17 nucleotides) downstream of a 5′-NTTY-3′, 5′-NTTC-3′, 5′-NTTT-3′, 5′-NTTA-3′, 5′-NTTB-3′, 5′-NTTG-3′, 5′-CTTY-3′, 5‘-DTTR’3′, 5′-CTTR-3′, 5′-DTTT-3′, 5′-ATTN-3′, or 5′-GTTN-3′ sequence and ends within about 20 to about 25 nucleotides (e.g., about 17, 18, 19, 20, 21, 22, 23, 24, 25, 26, 27, or 28 nucleotides) downstream of the 5′-NTTY-3′, 5′-NTTC-3′, 5′-NTTT-3′, 5′-NTTA-3′, 5′-NTTB-3′, 5′-NTTG-3′, 5′-CTTY-3′, 5‘-DTTR’3′, 5′-CTTR-3′, 5′-DTTT-3′, 5′-ATTN-3′, or 5′-GTTN-3′ sequence. In some embodiments, the deletion starts within about 5 to about 15 nucleotides (e.g., about 3, 4, 5, 6, 7, 8, 9, 10, 11, 12, 13, 14, 15, 16, or 17 nucleotides) downstream of a 5′-CTTT-3′, 5′-CTTC-3′, 5′-GTTT-3′, 5′-GTTC-3′, 5′-TTTC-3′, 5′-GTTA-3′, or 5′-GTTG-3′ sequence and ends within about 20 to about 25 nucleotides (e.g., about 17, 18, 19, 20, 21, 22, 23, 24, 25, 26, 27, or 28 nucleotides) downstream of the 5′-CTTT-3′, 5′-CTTC-3′, 5′-GTTT-3′, 5′-GTTC-3′, 5′-TTTC-3′, 5′-GTTA-3′, or 5′-GTTG-3′ sequence. In some embodiments, the deletion starts within about 5 to about 15 nucleotides (e.g., about 3, 4, 5, 6, 7, 8, 9, 10, 11, 12, 13, 14, 15, 16, or 17 nucleotides) downstream of a T/C-rich sequence and ends within about 20 to about 25 nucleotides (e.g., about 17, 18, 19, 20, 21, 22, 23, 24, 25, 26, 27, or 28 nucleotides) downstream of the T/C-rich sequence.

[0790] In some embodiments, the deletion starts within about 5 to about 15 nucleotides (e.g., about 3, 4, 5, 6, 7, 8, 9, 10, 11, 12, 13, 14, 15, 16, or 17 nucleotides) and ends within about 25 to about 30 nucleotides (e.g., about 22, 23, 24, 25, 26, 27, 28, 29, 30, 31, 32, or 33 nucleotides) of the 5′-NTTN-3′ sequence. In some embodiments, the deletion starts within about 5 to about 15 nucleotides (e.g., about 3, 4, 5, 6, 7, 8, 9, 10, 11, 12, 13, 14, 15, 16, or 17 nucleotides) and ends within about 25 to about 30 nucleotides (e.g., about 22, 23, 24, 25, 26, 27, 28, 29, 30, 31, 32, or 33 nucleotides) of a 5′-NTTY-3′, 5′-NTTC-3′, 5′-NTTT-3′, 5′-NTTA-3′, 5′-NTTB-3′, 5′-NTTG-3′, 5′-CTTY-3′, 5‘-DTTR’3′, 5′-CTTR-3′, 5′-DTTT-3′, 5′-ATTN-3′, or 5′-GTTN-3′ sequence. In some embodiments, the deletion starts within about 5 to about 15 nucleotides (e.g., about 3, 4, 5, 6, 7, 8, 9, 10, 11, 12, 13, 14, 15, 16, or 17 nucleotides) and ends within about 25 to about 30 nucleotides (e.g., about 22, 23, 24, 25, 26, 27, 28, 29, 30, 31, 32, or 33 nucleotides) of a 5′-CTTT-3′, 5′-CTTC-3′, 5′-GTTT-3′, 5′-GTTC-3′, 5′-TTTC-3′, 5′-GTTA-3′, or 5′-GTTG-3′ sequence. In some embodiments, the deletion starts within about 5 to about 15 nucleotides (e.g., about 3, 4, 5, 6, 7, 8, 9, 10, 11, 12, 13, 14, 15, 16, or 17 nucleotides) and ends within about 25 to about 30 nucleotides (e.g., about 22, 23, 24, 25, 26, 27, 28, 29, 30, 31, 32, or 33 nucleotides) of a T/C-rich sequence.

[0791] In some embodiments, the deletion starts within about 5 to about 15 nucleotides (e.g., about 3, 4, 5, 6, 7, 8, 9, 10, 11, 12, 13, 14, 15, 16, or 17 nucleotides) downstream of the 5′-NTTN-3′ sequence and ends within about 25 to about 30 nucleotides (e.g., about 22, 23, 24, 25, 26, 27, 28, 29, 30, 31, 32, or 33 nucleotides) downstream of the 5′-NTTN-3′ sequence. In some embodiments, the deletion starts within about 5 to about 15 nucleotides (e.g., about 3, 4, 5, 6, 7, 8, 9, 10, 11, 12, 13, 14, 15, 16, or 17 nucleotides) downstream of a 5′-NTTY-3′, 5′-NTTC-3′, 5′-NTTT-3′, 5′-NTTA-3′, 5′-NTTB-3′, 5′-NTTG-3′, 5′-CTTY-3′, 5‘-DTTR’3′, 5′-CTTR-3′, 5′-DTTT-3′, 5′-ATTN-3′, or 5′-GTTN-3′ sequence and ends within about 25 to about 30 nucleotides (e.g., about 22, 23, 24, 25, 26, 27, 28, 29, 30, 31, 32, or 33 nucleotides) downstream of the 5′-NTTY-3′, 5′-NTTC-3′, 5′-NTTT-3′, 5′-NTTA-3′, 5′-NTTB-3′, 5′-NTTG-3′, 5′-CTTY-3′, 5‘-DTTR’3′, 5′-CTTR-3′, 5′-DTTT-3′, 5′-ATTN-3′, or 5′-GTTN-3′ sequence. In some embodiments, the deletion starts within about 5 to about 15 nucleotides (e.g., about 3, 4, 5, 6, 7, 8, 9, 10, 11, 12, 13, 14, 15, 16, or 17 nucleotides) downstream of a 5′-CTTT-3′, 5′-CTTC-3′, 5′-GTTT-3′, 5′-GTTC-3′, 5′-TTTC-3′, 5′-GTTA-3′, or 5′-GTTG-3′ sequence and ends within about 25 to about 30 nucleotides (e.g., about 22, 23, 24, 25, 26, 27, 28, 29, 30, 31, 32, or 33 nucleotides) downstream of the 5′-CTTT-3′, 5′-CTTC-3′, 5′-GTTT-3′, 5′-GTTC-3′, 5′-TTTC-3′, 5′-GTTA-3′, or 5′-GTTG-3′ sequence. In some embodiments, the deletion starts within about 5 to about 15 nucleotides (e.g., about 3, 4, 5, 6, 7, 8, 9, 10, 11, 12, 13, 14, 15, 16, or 17 nucleotides) downstream of a T/C-rich sequence and ends within about 25 to about 30 nucleotides (e.g., about 22, 23, 24, 25, 26, 27, 28, 29, 30, 31, 32, or 33 nucleotides) downstream of the T/C-rich sequence.

[0792] In some embodiments, the deletion starts within about 5 to about 10 nucleotides (e.g., about 3, 4, 5, 6, 7, 8, 9, 10, 11, or 12 nucleotides) and ends within about 20 to about 30 nucleotides (e.g., about 17, 18, 19, 20, 21, 22, 23, 24, 25, 26, 27, 28, 29, 30, 31, 32, or 33 nucleotides) of the 5′-NTTN-3′ sequence. In some embodiments, the deletion starts within about 5 to about 10 nucleotides (e.g., about 3, 4, 5, 6, 7, 8, 9, 10, 11, or 12 nucleotides) and ends within about 20 to about 30 nucleotides (e.g., about 17, 18, 19, 20, 21, 22, 23, 24, 25, 26, 27, 28, 29, 30, 31, 32, or 33 nucleotides) of a 5′-NTTY-3′, 5′-NTTC-3′, 5′-NTTT-3′, 5′-NTTA-3′, 5′-NTTB-3′, 5′-NTTG-3′, 5′-CTTY-3′, 5‘-DTTR’3′, 5′-CTTR-3′, 5′-DTTT-3′, 5′-ATTN-3′, or 5′-GTTN-3′ sequence. In some embodiments, the deletion starts within about 5 to about 10 nucleotides (e.g., about 3, 4, 5, 6, 7, 8, 9, 10, 11, or 12 nucleotides) and ends within about 20 to about 30 nucleotides (e.g., about 17, 18, 19, 20, 21, 22, 23, 24, 25, 26, 27, 28, 29, 30, 31, 32, or 33 nucleotides) of a 5′-CTTT-3′, 5′-CTTC-3′, 5′-GTTT-3′, 5′-GTTC-3′, 5′-TTTC-3′, 5′-GTTA-3′, or 5′-GTTG-3′ sequence. In some embodiments, the deletion starts within about 5 to about 10 nucleotides (e.g., about 3, 4, 5, 6, 7, 8, 9, 10, 11, or 12 nucleotides) and ends within about 20 to about 30 nucleotides (e.g., about 17, 18, 19, 20, 21, 22, 23, 24, 25, 26, 27, 28, 29, 30, 31, 32, or 33 nucleotides) of a T/C-rich sequence.

[0793] In some embodiments, the deletion starts within about 5 to about 10 nucleotides (e.g., about 3, 4, 5, 6, 7, 8, 9, 10, 11, or 12 nucleotides) downstream of the 5′-NTTN-3′ sequence and ends within about 20 to about 30 nucleotides (e.g., about 17, 18, 19, 20, 21, 22, 23, 24, 25, 26, 27, 28, 29, 30, 31, 32, or 33 nucleotides) downstream of the 5′-NTTN-3′ sequence. In some embodiments, the deletion starts within about 5 to about 10 nucleotides (e.g., about 3, 4, 5, 6, 7, 8, 9, 10, 11, or 12 nucleotides) downstream of a 5′-NTTY-3′, 5′-NTTC-3′, 5′-NTTT-3′, 5′-NTTA-3′, 5′-NTTB-3′, 5′-NTTG-3′, 5′-CTTY-3′, 5‘-DTTR’3′, 5′-CTTR-3′, 5′-DTTT-3′, 5′-ATTN-3′, or 5′-GTTN-3′ sequence and ends within about 20 to about 30 nucleotides (e.g., about 17, 18, 19, 20, 21, 22, 23, 24, 25, 26, 27, 28, 29, 30, 31, 32, or 33 nucleotides) downstream of the 5′-NTTY-3′, 5′-NTTC-3′, 5′-NTTT-3′, 5′-NTTA-3′, 5′-NTTB-3′, 5′-NTTG-3′, 5′-CTTY-3′, 5‘-DTTR’3′, 5′-CTTR-3′, 5′-DTTT-3′, 5′-ATTN-3′, or 5′-GTTN-3′ sequence. In some embodiments, the deletion starts within about 5 to about 10 nucleotides (e.g., about 3, 4, 5, 6, 7, 8, 9, 10, 11, or 12 nucleotides) downstream of a 5′-CTTT-3′, 5′-CTTC-3′, 5′-GTTT-3′, 5′-GTTC-3′, 5′-TTTC-3′, 5′-GTTA-3′, or 5′-GTTG-3′ sequence and ends within about 20 to about 30 nucleotides (e.g., about 17, 18, 19, 20, 21, 22, 23, 24, 25, 26, 27, 28, 29, 30, 31, 32, or 33 nucleotides) downstream of the 5′-CTTT-3′, 5′-CTTC-3′, 5′-GTTT-3′, 5′-GTTC-3′, 5′-TTTC-3′, 5′-GTTA-3′, or 5′-GTTG-3′ sequence. In some embodiments, the deletion starts within about 5 to about 10 nucleotides (e.g., about 3, 4, 5, 6, 7, 8, 9, 10, 11, or 12 nucleotides) downstream of a T/C-rich sequence and ends within about 20 to about 30 nucleotides (e.g., about 17, 18, 19, 20, 21, 22, 23, 24, 25, 26, 27, 28, 29, 30, 31, 32, or 33 nucleotides) downstream of the T/C-rich sequence.

[0794] In some embodiments, the deletion starts within about 5 to about 10 nucleotides (e.g., about 3, 4, 5, 6, 7, 8, 9, 10, 11, or 12 nucleotides) and ends within about 20 to about 25 nucleotides (e.g., about 17, 18, 19, 20, 21, 22, 23, 24, 25, 26, 27, or 28 nucleotides) of the 5′-NTTN-3′ sequence. In some embodiments, the deletion starts within about 5 to about 10 nucleotides (e.g., about 3, 4, 5, 6, 7, 8, 9, 10, 11, or 12 nucleotides) and ends within about 20 to about 25 nucleotides (e.g., about 17, 18, 19, 20, 21, 22, 23, 24, 25, 26, 27, or 28 nucleotides) of a 5′-NTTY-3′, 5′-NTTC-3′, 5′-NTTT-3′, 5′-NTTA-3′, 5′-NTTB-3′, 5′-NTTG-3′, 5′-CTTY-3′, 5‘-DTTR’3′, 5′-CTTR-3′, 5′-DTTT-3′, 5′-ATTN-3′, or 5′-GTTN-3′ sequence. In some embodiments, the deletion starts within about 5 to about 10 nucleotides (e.g., about 3, 4, 5, 6, 7, 8, 9, 10, 11, or 12 nucleotides) and ends within about 20 to about 25 nucleotides (e.g., about 17, 18, 19, 20, 21, 22, 23, 24, 25, 26, 27, or 28 nucleotides) of a 5′-CTTT-3′, 5′-CTTC-3′, 5′-GTTT-3′, 5′-GTTC-3′, 5′-TTTC-3′, 5′-GTTA-3′, or 5′-GTTG-3′ sequence. In some embodiments, the deletion starts within about 5 to about 10 nucleotides and ends within about 20 to about 25 nucleotides (e.g., about 17, 18, 19, 20, 21, 22, 23, 24, 25, 26, 27, or 28 nucleotides) (e.g., about 3, 4, 5, 6, 7, 8, 9, 10, 11, or 12 nucleotides) of a T/C-rich sequence.

[0795] In some embodiments, the deletion starts within about 5 to about 10 nucleotides (e.g., about 3, 4, 5, 6, 7, 8, 9, 10, 11, or 12 nucleotides) downstream of the 5′-NTTN-3′ sequence and ends within about 20 to about 25 nucleotides (e.g., about 17, 18, 19, 20, 21, 22, 23, 24, 25, 26, 27, or 28 nucleotides) downstream of the 5′-NTTN-3′ sequence. In some embodiments, the deletion starts within about 5 to about 10 nucleotides (e.g., about 3, 4, 5, 6, 7, 8, 9, 10, 11, or 12 nucleotides) downstream of a 5′-NTTY-3′, 5′-NTTC-3′, 5′-NTTT-3′, 5′-NTTA-3′, 5′-NTTB-3′, 5′-NTTG-3′, 5′-CTTY-3′, 5‘-DTTR’3′, 5′-CTTR-3′, 5′-DTTT-3′, 5′-ATTN-3′, or 5′-GTTN-3′ sequence and ends within about 20 to about 25 nucleotides (e.g., about 17, 18, 19, 20, 21, 22, 23, 24, 25, 26, 27, or 28 nucleotides) downstream of the 5′-NTTY-3′, 5′-NTTC-3′, 5′-NTTT-3′, 5′-NTTA-3′, 5′-NTTB-3′, 5′-NTTG-3′, 5′-CTTY-3′, 5‘-DTTR’3′, 5′-CTTR-3′, 5′-DTTT-3′, 5′-ATTN-3′, or 5′-GTTN-3′ sequence. In some embodiments, the deletion starts within about 5 to about 10 nucleotides (e.g., about 3, 4, 5, 6, 7, 8, 9, 10, 11, or 12 nucleotides) downstream of a 5′-CTTT-3′, 5′-CTTC-3′, 5′-GTTT-3′, 5′-GTTC-3′, 5′-TTTC-3′, 5′-GTTA-3′, or 5′-GTTG-3′ sequence and ends within about 20 to about 25 nucleotides (e.g., about 17, 18, 19, 20, 21, 22, 23, 24, 25, 26, 27, or 28 nucleotides) downstream of the 5′-CTTT-3′, 5′-CTTC-3′, 5′-GTTT-3′, 5′-GTTC-3′, 5′-TTTC-3′, 5′-GTTA-3′, or 5′-GTTG-3′ sequence. In some embodiments, the deletion starts within about 5 to about 10 nucleotides (e.g., about 3, 4, 5, 6, 7, 8, 9, 10, 11, or 12 nucleotides) downstream of a T/C-rich sequence and ends within about 20 to about 25 nucleotides (e.g., about 17, 18, 19, 20, 21, 22, 23, 24, 25, 26, 27, or 28 nucleotides) downstream of the T/C-rich sequence.

[0796] In some embodiments, the deletion starts within about 5 to about 10 nucleotides (e.g., about 3, 4, 5, 6, 7, 8, 9, 10, 11, or 12 nucleotides) and ends within about 25 to about 30 nucleotides (e.g., about 22, 23, 24, 25, 26, 27, 28, 29, 30, 31, 32, or 33 nucleotides) of the 5′-NTTN-3′ sequence. In some embodiments, the deletion starts within about 5 to about 10 nucleotides (e.g., about 3, 4, 5, 6, 7, 8, 9, 10, 11, or 12 nucleotides) and ends within about 25 to about 30 nucleotides (e.g., about 22, 23, 24, 25, 26, 27, 28, 29, 30, 31, 32, or 33 nucleotides) of a 5′-NTTY-3′, 5′-NTTC-3′, 5′-NTTT-3′, 5′-NTTA-3′, 5′-NTTB-3′, 5′-NTTG-3′, 5′-CTTY-3′, 5‘-DTTR’3′, 5′-CTTR-3′, 5′-DTTT-3′, 5′-ATTN-3′, or 5′-GTTN-3′ sequence. In some embodiments, the deletion starts within about 5 to about 10 nucleotides (e.g., about 3, 4, 5, 6, 7, 8, 9, 10, 11, or 12 nucleotides) and ends within about 25 to about 30 nucleotides (e.g., about 22, 23, 24, 25, 26, 27, 28, 29, 30, 31, 32, or 33 nucleotides) of a 5′-CTTT-3′, 5′-CTTC-3′, 5′-GTTT-3′, 5′-GTTC-3′, 5′-TTTC-3′, 5′-GTTA-3′, or 5′-GTTG-3′ sequence. In some embodiments, the deletion starts within about 5 to about 10 nucleotides (e.g., about 3, 4, 5, 6, 7, 8, 9, 10, 11, or 12 nucleotides) and ends within about 25 to about 30 nucleotides (e.g., about 22, 23, 24, 25, 26, 27, 28, 29, 30, 31, 32, or 33 nucleotides) of a T/C-rich sequence.

[0797] In some embodiments, the deletion starts within about 5 to about 10 nucleotides (e.g., about 3, 4, 5, 6, 7, 8, 9, 10, 11, or 12 nucleotides) downstream of the 5′-NTTN-3′ sequence and ends within about 25 to about 30 nucleotides (e.g., about 22, 23, 24, 25, 26, 27, 28, 29, 30, 31, 32, or 33 nucleotides) downstream of the 5′-NTTN-3′ sequence. In some embodiments, the deletion starts within about 5 to about 10 nucleotides (e.g., about 3, 4, 5, 6, 7, 8, 9, 10, 11, or 12 nucleotides) downstream of a 5′-NTTY-3′, 5′-NTTC-3′, 5′-NTTT-3′, 5′-NTTA-3′, 5′-NTTB-3′, 5′-NTTG-3′, 5′-CTTY-3′, 5‘-DTTR’3′, 5′-CTTR-3′, 5′-DTTT-3′, 5′-ATTN-3′, or 5′-GTTN-3′ sequence and ends within about 25 to about 30 nucleotides (e.g., about 22, 23, 24, 25, 26, 27, 28, 29, 30, 31, 32, or 33 nucleotides) downstream of the 5′-NTTY-3′, 5′-NTTC-3′, 5′-NTTT-3′, 5′-NTTA-3′, 5′-NTTB-3′, 5′-NTTG-3′, 5′-CTTY-3′, 5‘-DTTR’3′, 5′-CTTR-3′, 5′-DTTT-3′, 5′-ATTN-3′, or 5′-GTTN-3′ sequence. In some embodiments, the deletion starts within about 5 to about 10 nucleotides (e.g., about 3, 4, 5, 6, 7, 8, 9, 10, 11, or 12 nucleotides) downstream of a 5′-CTTT-3′, 5′-CTTC-3′, 5′-GTTT-3′, 5′-GTTC-3′, 5′-TTTC-3′, 5′-GTTA-3′, or 5′-GTTG-3′ sequence and ends within about 25 to about 30 nucleotides (e.g., about 22, 23, 24, 25, 26, 27, 28, 29, 30, 31, 32, or 33 nucleotides) downstream of the 5′-CTTT-3′, 5′-CTTC-3′, 5′-GTTT-3′, 5′-GTTC-3′, 5′-TTTC-3′, 5′-GTTA-3′, or 5′-GTTG-3′ sequence. In some embodiments, the deletion starts within about 5 to about 10 nucleotides (e.g., about 3, 4, 5, 6, 7, 8, 9, 10, 11, or 12 nucleotides) downstream of a T/C-rich sequence and ends within about 25 to about 30 nucleotides (e.g., about 22, 23, 24, 25, 26, 27, 28, 29, 30, 31, 32, or 33 nucleotides) downstream of the T/C-rich sequence.

[0798] In some embodiments, the deletion starts within about 10 to about 15 nucleotides (e.g., about 8, 9, 10, 11, 12, 13, 14, 15, 16, or 17 nucleotides) and ends within about 20 to about 30 nucleotides (e.g., about 17, 18, 19, 20, 21, 22, 23, 24, 25, 26, 27, 28, 29, 30, 31, 32, or 33 nucleotides) of the 5′-NTTN-3′ sequence. In some embodiments, the deletion starts within about 10 to about 15 nucleotides (e.g., about 8, 9, 10, 11, 12, 13, 14, 15, 16, or 17 nucleotides) and ends within about 20 to about 30 nucleotides (e.g., about 17, 18, 19, 20, 21, 22, 23, 24, 25, 26, 27, 28, 29, 30, 31, 32, or 33 nucleotides) of a 5′-NTTY-3′, 5′-NTTC-3′, 5′-NTTT-3′, 5′-NTTA-3′, 5′-NTTB-3′, 5′-NTTG-3′, 5′-CTTY-3′, 5‘-DTTR’3′, 5′-CTTR-3′, 5′-DTTT-3′, 5′-ATTN-3′, or 5′-GTTN-3′ sequence. In some embodiments, the deletion starts within about 10 to about 15 nucleotides (e.g., about 8, 9, 10, 11, 12, 13, 14, 15, 16, or 17 nucleotides) and ends within about 20 to about 30 nucleotides (e.g., about 17, 18, 19, 20, 21, 22, 23, 24, 25, 26, 27, 28, 29, 30, 31, 32, or 33 nucleotides) of a 5′-CTTT-3′, 5′-CTTC-3′, 5′-GTTT-3′, 5′-GTTC-3′, 5′-TTTC-3′, 5′-GTTA-3′, or 5′-GTTG-3′ sequence. In some embodiments, the deletion starts within about 10 to about 15 nucleotides (e.g., about 8, 9, 10, 11, 12, 13, 14, 15, 16, or 17 nucleotides) and ends within about 20 to about 30 nucleotides (e.g., about 17, 18, 19, 20, 21, 22, 23, 24, 25, 26, 27, 28, 29, 30, 31, 32, or 33 nucleotides) of a T/C-rich sequence.

[0799] In some embodiments, the deletion starts within about 10 to about 15 nucleotides (e.g., about 8, 9, 10, 11, 12, 13, 14, 15, 16, or 17 nucleotides) downstream of the 5′-NTTN-3′ sequence and ends within about 20 to about 30 nucleotides (e.g., about 17, 18, 19, 20, 21, 22, 23, 24, 25, 26, 27, 28, 29, 30, 31, 32, or 33 nucleotides) downstream of the 5′-NTTN-3′ sequence. In some embodiments, the deletion starts within about 10 to about 15 nucleotides (e.g., about 8, 9, 10, 11, 12, 13, 14, 15, 16, or 17 nucleotides) downstream of a 5′-NTTY-3′, 5′-NTTC-3′, 5′-NTTT-3′, 5′-NTTA-3′, 5′-NTTB-3′, 5′-NTTG-3′, 5′-CTTY-3′, 5‘-DTTR’3′, 5′-CTTR-3′, 5′-DTTT-3′, 5′-ATTN-3′, or 5′-GTTN-3′ sequence and ends within about 20 to about 30 nucleotides (e.g., about 17, 18, 19, 20, 21, 22, 23, 24, 25, 26, 27, 28, 29, 30, 31, 32, or 33 nucleotides) downstream of the 5′-NTTY-3′, 5′-NTTC-3′, 5′-NTTT-3′, 5′-NTTA-3′, 5′-NTTB-3′, 5′-NTTG-3′, 5′-CTTY-3′, 5‘-DTTR’3′, 5′-CTTR-3′, 5′-DTTT-3′, 5′-ATTN-3′, or 5′-GTTN-3′ sequence. In some embodiments, the deletion starts within about 10 to about 15 nucleotides (e.g., about 8, 9, 10, 11, 12, 13, 14, 15, 16, or 17 nucleotides) downstream of a 5′-CTTT-3′, 5′-CTTC-3′, 5′-GTTT-3′, 5′-GTTC-3′, 5′-TTTC-3′, 5′-GTTA-3′, or 5′-GTTG-3′ sequence and ends within about 20 to about 30 nucleotides (e.g., about 17, 18, 19, 20, 21, 22, 23, 24, 25, 26, 27, 28, 29, 30, 31, 32, or 33 nucleotides) downstream of the 5′-CTTT-3′, 5′-CTTC-3′, 5′-GTTT-3′, 5′-GTTC-3′, 5′-TTTC-3′, 5′-GTTA-3′, or 5′-GTTG-3′ sequence. In some embodiments, the deletion starts within about 10 to about 15 nucleotides (e.g., about 8, 9, 10, 11, 12, 13, 14, 15, 16, or 17 nucleotides) downstream of a T/C-rich sequence and ends within about 20 to about 30 nucleotides (e.g., about 17, 18, 19, 20, 21, 22, 23, 24, 25, 26, 27, 28, 29, 30, 31, 32, or 33 nucleotides) downstream of the T/C-rich sequence.

[0800] In some embodiments, the deletion starts within about 10 to about 15 nucleotides (e.g., about 8, 9, 10, 11, 12, 13, 14, 15, 16, or 17 nucleotides) and ends within about 20 to about 25 nucleotides (e.g., about 17, 18, 19, 20, 21, 22, 23, 24, 25, 26, 27, or 28 nucleotides) of the 5′-NTTN-3′ sequence. In some embodiments, the deletion starts within about 10 to about 15 nucleotides (e.g., about 8, 9, 10, 11, 12, 13, 14, 15, 16, or 17 nucleotides) and ends within about 20 to about 25 nucleotides (e.g., about 17, 18, 19, 20, 21, 22, 23, 24, 25, 26, 27, or 28 nucleotides) of a 5′-NTTY-3′, 5′-NTTC-3′, 5′-NTTT-3′, 5′-NTTA-3′, 5′-NTTB-3′, 5′-NTTG-3′, 5′-CTTY-3′, 5‘-DTTR’3′, 5′-CTTR-3′, 5′-DTTT-3′, 5′-ATTN-3′, or 5′-GTTN-3′ sequence. In some embodiments, the deletion starts within about 10 to about 15 nucleotides (e.g., about 8, 9, 10, 11, 12, 13, 14, 15, 16, or 17 nucleotides) and ends within about 20 to about 25 nucleotides (e.g., about 17, 18, 19, 20, 21, 22, 23, 24, 25, 26, 27, or 28 nucleotides) of a 5′-CTTT-3′, 5′-CTTC-3′, 5′-GTTT-3′, 5′-GTTC-3′, 5′-TTTC-3′, 5′-GTTA-3′, or 5′-GTTG-3′ sequence. In some embodiments, the deletion starts within about 10 to about 15 nucleotides (e.g., about 8, 9, 10, 11, 12, 13, 14, 15, 16, or 17 nucleotides) and ends within about 20 to about 25 nucleotides (e.g., about 17, 18, 19, 20, 21, 22, 23, 24, 25, 26, 27, or 28 nucleotides) of a T/C-rich sequence.

[0801] In some embodiments, the deletion starts within about 10 to about 15 nucleotides (e.g., about 8, 9, 10, 11, 12, 13, 14, 15, 16, or 17 nucleotides) downstream of the 5′-NTTN-3′ sequence and ends within about 20 to about 25 nucleotides (e.g., about 17, 18, 19, 20, 21, 22, 23, 24, 25, 26, 27, or 28 nucleotides) downstream of the 5′-NTTN-3′ sequence. In some embodiments, the deletion starts within about 10 to about 15 nucleotides (e.g., about 8, 9, 10, 11, 12, 13, 14, 15, 16, or 17 nucleotides) downstream of a 5′-NTTY-3′, 5′-NTTC-3′, 5′-NTTT-3′, 5′-NTTA-3′, 5′-NTTB-3′, 5′-NTTG-3′, 5′-CTTY-3′, 5‘-DTTR’3′, 5′-CTTR-3′, 5′-DTTT-3′, 5′-ATTN-3′, or 5′-GTTN-3′ sequence and ends within about 20 to about 25 nucleotides (e.g., about 17, 18, 19, 20, 21, 22, 23, 24, 25, 26, 27, or 28 nucleotides) downstream of the 5′-NTTY-3′, 5′-NTTC-3′, 5′-NTTT-3′, 5′-NTTA-3′, 5′-NTTB-3′, 5′-NTTG-3′, 5′-CTTY-3′, 5‘-DTTR’3′, 5′-CTTR-3′, 5′-DTTT-3′, 5′-ATTN-3′, or 5′-GTTN-3′ sequence. In some embodiments, the deletion starts within about 10 to about 15 nucleotides (e.g., about 8, 9, 10, 11, 12, 13, 14, 15, 16, or 17 nucleotides) downstream of a 5′-CTTT-3′, 5′-CTTC-3′, 5′-GTTT-3′, 5′-GTTC-3′, 5′-TTTC-3′, 5′-GTTA-3′, or 5′-GTTG-3′ sequence and ends within about 20 to about 25 nucleotides (e.g., about 17, 18, 19, 20, 21, 22, 23, 24, 25, 26, 27, or 28 nucleotides) downstream of the 5′-CTTT-3′, 5′-CTTC-3′, 5′-GTTT-3′, 5′-GTTC-3′, 5′-TTTC-3′, 5′-GTTA-3′, or 5′-GTTG-3′ sequence. In some embodiments, the deletion starts within about 10 to about 15 nucleotides (e.g., about 8, 9, 10, 11, 12, 13, 14, 15, 16, or 17 nucleotides) downstream of a T/C-rich sequence and ends within about 20 to about 25 nucleotides (e.g., about 17, 18, 19, 20, 21, 22, 23, 24, 25, 26, 27, or 28 nucleotides) downstream of the T/C-rich sequence.

[0802] In some embodiments, the deletion starts within about 10 to about 15 nucleotides (e.g., about 8, 9, 10, 11, 12, 13, 14, 15, 16, or 17 nucleotides) and ends within about 25 to about 30 nucleotides (e.g., about 22, 23, 24, 25, 26, 27, 28, 29, 30, 31, 32, or 33 nucleotides) of the 5′-NTTN-3′ sequence. In some embodiments, the deletion starts within about 10 to about 15 nucleotides (e.g., about 8, 9, 10, 11, 12, 13, 14, 15, 16, or 17 nucleotides) and ends within about 25 to about 30 nucleotides (e.g., about 22, 23, 24, 25, 26, 27, 28, 29, 30, 31, 32, or 33 nucleotides) of a 5′-NTTY-3′, 5′-NTTC-3′, 5′-NTTT-3′, 5′-NTTA-3′, 5′-NTTB-3′, 5′-NTTG-3′, 5′-CTTY-3′, 5‘-DTTR’3′, 5′-CTTR-3′, 5′-DTTT-3′, 5′-ATTN-3′, or 5′-GTTN-3′ sequence. In some embodiments, the deletion starts within about 10 to about 15 nucleotides (e.g., about 8, 9, 10, 11, 12, 13, 14, 15, 16, or 17 nucleotides) and ends within about 25 to about 30 nucleotides (e.g., about 22, 23, 24, 25, 26, 27, 28, 29, 30, 31, 32, or 33 nucleotides) of a 5′-CTTT-3′, 5′-CTTC-3′, 5′-GTTT-3′, 5′-GTTC-3′, 5′-TTTC-3′, 5′-GTTA-3′, or 5′-GTTG-3′ sequence. In some embodiments, the deletion starts within about 10 to about 15 nucleotides (e.g., about 8, 9, 10, 11, 12, 13, 14, 15, 16, or 17 nucleotides) and ends within about 25 to about 30 nucleotides (e.g., about 22, 23, 24, 25, 26, 27, 28, 29, 30, 31, 32, or 33 nucleotides) of a T/C-rich sequence.

[0803] In some embodiments, the deletion starts within about 10 to about 15 nucleotides (e.g., about 8, 9, 10, 11, 12, 13, 14, 15, 16, or 17 nucleotides) downstream of the 5′-NTTN-3′ sequence and ends within about 25 to about 30 nucleotides (e.g., about 22, 23, 24, 25, 26, 27, 28, 29, 30, 31, 32, or 33 nucleotides) downstream of the 5′-NTTN-3′ sequence. In some embodiments, the deletion starts within about 10 to about 15 nucleotides (e.g., about 8, 9, 10, 11, 12, 13, 14, 15, 16, or 17 nucleotides) downstream of a 5′-NTTY-3′, 5′-NTTC-3′, 5′-NTTT-3′, 5′-NTTA-3′, 5′-NTTB-3′, 5′-NTTG-3′, 5′-CTTY-3′, 5‘-DTTR’3′, 5′-CTTR-3′, 5′-DTTT-3′, 5′-ATTN-3′, or 5′-GTTN-3′ sequence and ends within about 25 to about 30 nucleotides (e.g., about 22, 23, 24, 25, 26, 27, 28, 29, 30, 31, 32, or 33 nucleotides) downstream of the 5′-NTTY-3′, 5′-NTTC-3′, 5′-NTTT-3′, 5′-NTTA-3′, 5′-NTTB-3′, 5′-NTTG-3′, 5′-CTTY-3′, 5‘-DTTR’3′, 5′-CTTR-3′, 5′-DTTT-3′, 5′-ATTN-3′, or 5′-GTTN-3′ sequence. In some embodiments, the deletion starts within about 10 to about 15 nucleotides (e.g., about 8, 9, 10, 11, 12, 13, 14, 15, 16, or 17 nucleotides) downstream of a 5′-CTTT-3′, 5′-CTTC-3′, 5′-GTTT-3′, 5′-GTTC-3′, 5′-TTTC-3′, 5′-GTTA-3′, or 5′-GTTG-3′ sequence and ends within about 25 to about 30 nucleotides (e.g., about 22, 23, 24, 25, 26, 27, 28, 29, 30, 31, 32, or 33 nucleotides) downstream of the 5′-CTTT-3′, 5′-CTTC-3′, 5′-GTTT-3′, 5′-GTTC-3′, 5′-TTTC-3′, 5′-GTTA-3′, or 5′-GTTG-3′ sequence. In some embodiments, the deletion starts within about 10 to about 15 nucleotides (e.g., about 8, 9, 10, 11, 12, 13, 14, 15, 16, or 17 nucleotides) downstream of a T/C-rich sequence and ends within about 25 to about 30 nucleotides (e.g., about 22, 23, 24, 25, 26, 27, 28, 29, 30, 31, 32, or 33 nucleotides) downstream of the T/C-rich sequence.

[0804] In some embodiments, the deletion is up to about 40 nucleotides in length (e.g., about 1, 2, 3, 4, 5, 6, 7, 8, 9, 10, 11, 12, 13, 14, 15, 16, 17, 18, 19, 20, 21, 22, 23, 24, 25, 26, 27, 28, 29, 30, 31, 32, 33, 34, 35, 36, 37, 38, 39, 40, 41, 42, 43, 44, or 45 nucleotides). In some embodiments, the deletion is between about 4 nucleotides and about 40 nucleotides in length (e.g., about 3, 4, 5, 6, 7, 8, 9, 10, 11, 12, 13, 14, 15, 16, 17, 18, 19, 20, 21, 22, 23, 24, 25, 26, 27, 28, 29, 30, 31, 32, 33, 34, 35, 36, 37, 38, 39, 40, 41, 42, 43, 44, or 45 nucleotides). In some embodiments, the deletion is between about 4 nucleotides and about 25 nucleotides in length (e.g., about 3, 4, 5, 6, 7, 8, 9, 10, 11, 12, 13, 14, 15, 16, 17, 18, 19, 20, 21, 22, 23, 24, 25, 26, 27, or 28 nucleotides). In some embodiments, the deletion is between about 10 nucleotides and about 25 nucleotides in length (e.g., about 7, 8, 9, 10, 11, 12, 13, 14, 15, 16, 17, 18, 19, 20, 21, 22, 23, 24, 25, 26, 27, or 28 nucleotides). In some embodiments, the deletion is between about 10 nucleotides and about 15 nucleotides in length (e.g., about 7, 8, 9, 10, 11, 12, 13, 14, 15, 16, or 17 nucleotides).

[0805] In some embodiments, the gene having a deletion is present in the nucleus of a cell. In some embodiments, the gene having a deletion is endogenous to the cell. In some embodiments, the gene having a deletion is a genomic DNA. In some embodiments, the gene having a deletion is a chromosomal DNA. In some embodiments, the gene having a deletion is a protein-coding gene (e.g., a gene encoding B2M, TRAC, or PDCD1) or a functional region thereof, such as a coding region, or a regulatory element, such as a promoter, enhancer, a 5′ or 3′ untranslated region, etc. In some embodiments, the deletion is in an exon (e.g., an exon of B2M, TRAC, or PDCD1) or an intron. In some embodiments, the gene having the deletion is a non-coding gene, such as transposon, miRNA, tRNA, ribosomal RNA, ribozyme, or lncRNA.

[0806] In some embodiments, the deletion alters expression of the gene. In some embodiments, the deletion alters function of the gene. In some embodiments, the deletion inactivates the gene. In some embodiments, the deletion is a frameshifting deletion. In some embodiments, the deletion is a non-frameshifting deletion. In some embodiments, the deletion leads to cell toxicity or cell death (e.g., apoptosis).

[0807] In some embodiments, a variant binary complex (e.g., a variant binary complex exhibiting increased complex formation with a targeting moiety as compared to a parent polypeptide) induces a DNA break that results in a deletion described herein in B2M. In some embodiments, the variant binary complex comprises a crRNA of Table 22. Indel activity in B2M is shown in FIG. 8, and reduction of B2M expression is shown in FIG. 9. See Example 13.

[0808] In some embodiments, a variant binary complex (e.g., a variant binary complex exhibiting increased complex formation with a targeting moiety as compared to a parent polypeptide) induces a DNA break that results in a deletion described herein in TRAC. In some embodiments, the variant binary complex comprises a crRNA of Table 23. Indel activity in TRAC is shown in FIG. 11A. See Example 13.

[0809] In some embodiments, a variant binary complex (e.g., a variant binary complex exhibiting increased complex formation with a targeting moiety as compared to a parent polypeptide) induces a DNA break that results in a deletion described herein in PDCD1. In some embodiments, the variant binary complex comprises a crRNA of Table 23. Indel activity in PDCD1 is shown in FIG. 12A. See Example 13.

[0810] In some embodiments, the deletion overlaps with a mutation in the gene. In some embodiments, the deletion overlaps with an insertion within the gene. For example, in some embodiments, the deletion removes a repeat expansion of the gene. In some embodiments, the deletion disrupts one allele of the gene. In some embodiments, the deletion disrupts both alleles of the gene.

[0811] In some embodiments, the deletion is induced in a eukaryotic cell or a prokaryotic cell. In some embodiments, the deletion is induced in an animal cell, a plant cell, or a fungal cell or the cell is derived from an animal cell, a plant cell, or a fungal cell. In some embodiments, the deletion is induced in a mammalian cell or derived from a mammalian cell. In some embodiments, the deletion is induced in a human cell or derived from a human cell. In some embodiments, the deletion is induced in a primary cell. In some embodiments, the deletion is induced in a cell line. In some embodiments, the deletion is induced in a T cell. In some embodiments, the deletion is induced in a stem cell (e.g., a totipotent/omnipotent stem cell, a pluripotent stem cell, a multipotent stem cell, an oligopotent stem cell, or an unipotent stem cell), a differentiated cell, or a terminally differentiated cell. In some embodiments, the variant binary complex selectively induces a DNA break that results in a deletion described herein in a cell (e.g., the variant binary complex does not form a non-target variant ternary complex, or the variant binary complex induces a DNA break that results in a higher ratio of on-target deletions to off-target deletions as compared to a parent binary complex. In some embodiments, a deletion described herein is induced in a cell that lacks additional deletions induced by a variant binary complex, as compared to an unmodified cell. For example, in some embodiments, a deletion described herein is induced in a cell that lacks additional variant Cas12i2 polypeptide-induced deletions greater to or less than about 10 nucleotides in length (e.g., additional deletions of about 40, 30, 25, 20, 15, 10, 9, 8, 7, 6, 5, 4, or 3 nucleotides in length), as compared to an unmodified cell. In some embodiments, the deletion is induced in a cell that lacks Cas12i2 polypeptide-induced insertions greater to or less than about 10 nucleotides in length (e.g., insertions of about 10, 9, 8, 7, 6, 5, 4, 3, 2, or 1 nucleotides in length), as compared to an unmodified cell. In some embodiments, 2 or more (e.g., multiplexed targeted deletions) deletions are induced.

[0812] In some aspects, the invention described herein includes a method of obtaining a deletion in a cell, wherein the method comprises contacting a variant Cas12i2 polypeptide as described herein with DNA in the cell.

[0813] In some aspects, the invention described herein includes a composition or formulation comprising the variant Cas12i2 polypeptide as described herein, a targeting moiety, and a cell.

### Preparation

[0814] In some embodiments, the variant Cas12i2 polypeptide of the present invention can be prepared by (a) culturing bacteria which produce the variant Cas12i2 polypeptide of the present invention, isolating the variant Cas12i2 polypeptide, optionally, purifying the variant Cas12i2 polypeptide, and complexing the variant Cas12i2 polypeptide with RNA guide. The variant Cas12i2 polypeptide can be also prepared by (b) a known genetic engineering technique, specifically, by isolating a gene encoding the variant Cas12i2 polypeptide of the present invention from bacteria, constructing a recombinant expression vector, and then transferring the vector into an appropriate host cell that expresses the RNA guide for expression of a recombinant protein that complexes with the RNA guide in the host cell. Alternatively, the variant Cas12i2 polypeptide can be prepared by (c) an in vitro coupled transcription-translation system and then complexes with RNA guide. Bacteria that can be used for preparation of the variant Cas12i2 polypeptide of the present invention are not particularly limited as long as they can produce the variant Cas12i2 polypeptide of the present invention. Some nonlimiting examples of the bacteria include E. coli cells described herein.

### Vectors

[0815] The present invention provides a vector for expressing the variant Cas12i2 polypeptide described herein or nucleic acids encoding the variant described herein may be incorporated into a vector. In some embodiments, a vector of the invention includes a nucleotide sequence encoding variant Cas12i2 polypeptide. In some embodiments, a vector of the invention includes a nucleotide sequence encoding the variant Cas12i2 polypeptide.

[0816] The present invention also provides a vector that may be used for preparation of the variant Cas12i2 polypeptide or compositions comprising the variant Cas12i2 polypeptide as described herein. In some embodiments, the invention includes the composition or vector described herein in a cell. In some embodiments, the invention includes a method of expressing the composition comprising the variant Cas12i2 polypeptide, or vector or nucleic acid encoding the variant Cas12i2 polypeptide, in a cell. The method may comprise the steps of providing the composition, e.g., vector or nucleic acid, and delivering the composition to the cell.

[0817] Expression of natural or synthetic polynucleotides is typically achieved by operably linking a polynucleotide encoding the gene of interest, e.g., nucleotide sequence encoding the variant Cas12i2 polypeptide, to a promoter and incorporating the construct into an expression vector. The expression vector is not particularly limited as long as it includes a polynucleotide encoding the variant Cas12i2 polypeptide of the present invention and can be suitable for replication and integration in eukaryotic cells.

[0818] Typical expression vectors include transcription and translation terminators, initiation sequences, and promoters useful for expression of the desired polynucleotide. For example, plasmid vectors carrying a recognition sequence for RNA polymerase (pSP64, pBluescript, etc.). may be used. Vectors including those derived from retroviruses such as lentivirus are suitable tools to achieve long-term gene transfer since they allow long-term, stable integration of a transgene and its propagation in daughter cells. Examples of vectors include expression vectors, replication vectors, probe generation vectors, and sequencing vectors. The expression vector may be provided to a cell in the form of a viral vector.

[0819] Viral vector technology is well known in the art and described in a variety of virology and molecular biology manuals. Viruses which are useful as vectors include, but are not limited to phage viruses, retroviruses, adenoviruses, adeno-associated viruses, herpes viruses, and lentiviruses. In general, a suitable vector contains an origin of replication functional in at least one organism, a promoter sequence, convenient restriction endonuclease sites, and one or more selectable markers.

[0820] The kind of the vector is not particularly limited, and a vector that can be expressed in host cells can be appropriately selected. To be more specific, depending on the kind of the host cell, a promoter sequence to ensure the expression of the variant Cas12i2 polypeptide from the polynucleotide is appropriately selected, and this promoter sequence and the polynucleotide are inserted into any of various plasmids etc. for preparation of the expression vector.

[0821] Additional promoter elements, e.g., enhancing sequences, regulate the frequency of transcriptional initiation. Typically, these are located in the region 30-110 bp upstream of the start site, although a number of promoters have recently been shown to contain functional elements downstream of the start site as well. Depending on the promoter, it appears that individual elements can function either cooperatively or independently to activate transcription.

[0822] Further, the disclosure should not be limited to the use of constitutive promoters. Inducible promoters are also contemplated as part of the disclosure. The use of an inducible promoter provides a molecular switch capable of turning on expression of the polynucleotide sequence which it is operatively linked when such expression is desired or turning off the expression when expression is not desired. Examples of inducible promoters include, but are not limited to a metallothionine promoter, a glucocorticoid promoter, a progesterone promoter, and a tetracycline promoter.

[0823] The expression vector to be introduced can also contain either a selectable marker gene or a reporter gene or both to facilitate identification and selection of expressing cells from the population of cells sought to be transfected or infected through viral vectors. In other aspects, the selectable marker may be carried on a separate piece of DNA and used in a co-transfection procedure. Both selectable markers and reporter genes may be flanked with appropriate transcriptional control sequences to enable expression in the host cells. Examples of such a marker include a dihydrofolate reductase gene and a neomycin resistance gene for eukaryotic cell culture; and a tetracycline resistance gene and an ampicillin resistance gene for culture of E. coli and other bacteria. By use of such a selection marker, it can be confirmed whether the polynucleotide encoding the variant Cas12i2 polypeptide of the present invention has been transferred into the host cells and then expressed without fail.

[0824] The preparation method for recombinant expression vectors is not particularly limited, and examples thereof include methods using a plasmid, a phage or a cosmid.

### Methods of Expression

[0825] The present invention includes a method for protein expression, comprising translating the variant Cas12i2 polypeptide described herein.

[0826] In some embodiments, a host cell described herein is used to express the variant Cas12i2 polypeptide. The host cell is not particularly limited, and various known cells can be preferably used. Specific examples of the host cell include bacteria such as E. coli, yeasts (budding yeast, Saccharomyces cerevisiae, and fission yeast, Schizosaccharomyces pombe), nematodes (Caenorhabditis elegans), Xenopus laevis oocytes, and animal cells (for example, CHO cells, COS cells and HEK293 cells). The method for transferring the expression vector described above into host cells, i.e., the transformation method, is not particularly limited, and known methods such as electroporation, the calcium phosphate method, the liposome method and the DEAE dextran method can be used.

[0827] After a host is transformed with the expression vector, the host cells may be cultured, cultivated or bred, for production of the variant Cas12i2 polypeptide. After expression of the variant Cas12i2 polypeptide, the host cells can be collected and variant Cas12i2 polypeptide purified from the cultures etc. according to conventional methods (for example, filtration, centrifugation, cell disruption, gel filtration chromatography, ion exchange chromatography, etc.).

[0828] In some embodiments, the methods for variant Cas12i2 polypeptide expression comprises translation of at least 5 amino acids, at least 10 amino acids, at least 15 amino acids, at least 20 amino acids, at least 50 amino acids, at least 100 amino acids, at least 150 amino acids, at least 200 amino acids, at least 250 amino acids, at least 300 amino acids, at least 400 amino acids, at least 500 amino acids, at least 600 amino acids, at least 700 amino acids, at least 800 amino acids, at least 900 amino acids, or at least 1000 amino acids of the variant Cas12i2 polypeptide. In some embodiments, the methods for protein expression comprises translation of about 5 amino acids, about 10 amino acids, about 15 amino acids, about 20 amino acids, about 50 amino acids, about 100 amino acids, about 150 amino acids, about 200 amino acids, about 250 amino acids, about 300 amino acids, about 400 amino acids, about 500 amino acids, about 600 amino acids, about 700 amino acids, about 800 amino acids, about 900 amino acids, about 1000 amino acids or more of the variant Cas12i2 polypeptide.

[0829] A variety of methods can be used to determine the level of production of a mature variant Cas12i2 polypeptide in a host cell. Such methods include, but are not limited to, for example, methods that utilize either polyclonal or monoclonal antibodies specific for the variant Cas12i2 polypeptide or a labeling tag as described elsewhere herein. Exemplary methods include, but are not limited to, enzyme-linked immunosorbent assays (ELISA), radioimmunoassays (MA), fluorescent immunoassays (FIA), and fluorescent activated cell sorting (FACS). These and other assays are well known in the art (See, e.g., Maddox et al., J. Exp. Med. 158:1211 [1983]).

[0830] The present disclosure provides methods of in vivo expression of the variant Cas12i2 polypeptide in a cell, comprising providing a polyribonucleotide encoding the variant Cas12i2 polypeptide to a host cell wherein the polyribonucleotide encodes the variant Cas12i2 polypeptide, expressing the variant Cas12i2 polypeptide in the cell, and obtaining the variant Cas12i2 polypeptide from the cell.

### Introduction of Alteration or Mutation

[0831] Nucleic acid sequences encoding variant polypeptides or variant polypeptides may be generated by synthetic methods known in the art. Using the nucleic acid sequence encoding the parent polypeptide itself as a framework, alternations or mutations can be inserted one or more at a time to alter the nucleic acid sequence encoding the parent polypeptide. Along the same lines, the parent polypeptide may be altered or mutated by introducing the changes into the polypeptide sequence as it is synthetically synthesized. This may be accomplished by methods well known in the art.

[0832] The production and introduction of alteration or mutation into a parent polypeptide sequence can be accomplished using any methods known by those of skill in the art. In particular, in some embodiments, oligonucleotide primers for PCR may be used for the rapid synthesis of a DNA template including the one or more alterations or mutations in the nucleic acid sequence encoding for the variant polypeptide. Site-specific mutagenesis may also be used as a technique useful in the preparation of individual peptides, or biologically functional equivalent proteins or peptides, through specific mutagenesis of the underlying DNA. The technique further provides a ready ability to prepare and test variants, incorporating one or more of the foregoing considerations, by introducing one or more nucleotide sequence changes into the DNA. Site-specific mutagenesis allows the production of variants through the use of specific oligonucleotide sequences which encode the DNA sequence of the desired mutation, as well as a sufficient number of adjacent nucleotides, to provide a primer sequence of sufficient size and sequence complexity to form a stable duplex on both sides of the deletion junction being traversed. Typically, a primer of about 17 to 25 nucleotides in length is preferred, with about 5 to 10 residues on both sides of the junction of the sequence being altered.

[0833] Introduction of structural variations, such as fusion of polypeptides as amino- and/or carboxyl-terminal extensions can be accomplished in a similar fashion as introduction of alterations or mutations into the parent polypeptide. The additional peptides may be added to the parent polypeptide or variant polypeptide by including the appropriate nucleic acid sequence encoding the additional peptides to the nucleic acid sequence encoding the parent polypeptide or variant polypeptide. Optionally, the additional peptides may be appended directly to the variant polypeptide through synthetic polypeptide production.

[0834] In an aspect, the invention also provides methods for introducing an alteration or mutation into the parent polypeptide sequence to produce a variant Cas12i2 polypeptide that has increased on-target binding with two or more loci (e.g., 2, 3, 4, 5, 6, 7, 8, 9, or more) of a target nucleic acid, as compared to a parent polypeptide.

[0835] In an aspect, the invention also provides methods for introducing an alteration or mutation into the parent polypeptide sequence to produce a plurality of variant Cas12i2 polypeptides (e.g., separate variant Cas12i2 polypeptides having the same amino acid sequence), that when individually complexed with a plurality of distinct RNA guides, have increased on-target binding with two or more loci of a target nucleic acid, as compared to a plurality of parent polypeptides and RNA guides.

[0836] In an aspect, the invention also provides methods for introducing an alteration or mutation into the parent polypeptide sequence to produce a variant Cas12i2 polypeptide that has increased on-target ternary complex formation with two or more target loci of a target nucleic acid, as compared to a parent polypeptide.

[0837] In an aspect, the invention also provides methods for introducing an alteration or mutation into the parent polypeptide sequence to produce a plurality of variant Cas12i2 polypeptides (e.g., separate variant Cas12i2 polypeptides having the same amino acid sequence), that when individually complexed with a plurality of distinct RNA guides, have increased ternary complex formation with two or more loci of a target nucleic acid, as compared to a plurality of parent polypeptides and RNA guides.

[0838] In an aspect, the invention also provides methods for introducing an alteration or mutation into the parent polypeptide sequence to produce a Cas12i2 polypeptides exhibit targeting of an increased number of target nucleic acids or target loci, as compared to a parent polypeptide.

[0839] In an aspect, the invention also provides methods for introducing an alteration or mutation into the parent polypeptide sequence to produce a plurality of variant Cas12i2 polypeptides (e.g., separate variant Cas12i2 polypeptides having the same amino acid sequence), that when individually complexed with a plurality of distinct RNA guides, exhibit targeting of an increased number of target nucleic acids or target loci, as compared to a plurality of parent polypeptides and RNA guides.

[0840] In an aspect, the invention also provides methods for introducing an alteration or mutation into the parent polypeptide sequence to enhance stability of the Cas12i2 polypeptide. Stability of the Cas12i2 polypeptide can be determined by or may include a technique not limited to thermal denaturation assays, thermal shift assays, differential scanning calorimetry (DSC), differential scanning fluorimetry (DSF), isothermal titration calorimetry (ITC), pulse-chase methods, bleach-chase methods, cycloheximide-chase methods, circular dichroism (CD) spectroscopy, crystallization, and fluorescence-based activity assays.

### Variant Selection for Functionality

[0841] In an aspect, the invention provides methods for introducing an alteration or mutation into the parent polypeptide sequence to enhance binary complex formation, RNA guide binding activity, and/or RNA guide binding specificity.

[0842] In an aspect, the invention also provides methods for introducing an alteration or mutation into the parent polypeptide sequence to enhance ternary complex formation, on-target binding affinity, on-target binding activity, on-target binding, and/or on-target binding specificity. In an aspect, the invention also provides methods for introducing an alteration or mutation into the parent polypeptide sequence to enhance on-target binding affinity (e.g., affinity or time it takes to interact with target), on-target binding activity (e.g., effector activity when interacting with target), on-target binding (e.g., strength of interaction with target), and/or on-target binding specificity (e.g., preference for specific target) of a binary complex (e.g., ribonucleoprotein).

[0843] In some embodiments, an alteration or mutation is introduced to the parent polypeptide sequence to produce a variant Cas12i2 polypeptide that has increased on-target binding and/or activity. Also, in such embodiments, off-target binding and/or activity can be decreased in the variant Cas12i2 polypeptide, as compared to the parent polypeptide. Moreover, there can be increased or decreased specificity as to on-target binding vs. off-target binding.

[0844] In some embodiments, an alteration or mutation is introduced to the parent polypeptide sequence to produce a variant Cas12i2 polypeptide, that when complexed with an RNA guide, has increased on-target binding. Also, in such embodiments, off-target binding can be decreased in the complex comprising the variant Cas12i2 polypeptide and RNA guide. Moreover, there can be increased or decreased specificity as to on-target binding/activity vs. off-target binding/activity.

[0845] In certain embodiments, an alteration or mutation is introduced to the parent polypeptide sequence to produce a variant Cas12i2 polypeptide that enhances stability and/or protein-RNA interactions. In certain embodiments, variant Cas12i2 polypeptide includes at least one alteration that promotes stability and/or RNA interactions as well as enzymatic activity of the variant Cas12i2 polypeptide, as compared to a parent polypeptide.

[0846] In certain embodiments, an alteration or mutation is introduced to the parent polypeptide sequence to produce a variant Cas12i2 polypeptide that (a) lacks enzymatic activity, yet (b) retains enhanced stability and/or protein-RNA interactions. In certain embodiments, variant Cas12i2 polypeptide includes at least one alteration that promotes stability and/or RNA interactions, but not enzymatic activity of the variant Cas12i2 polypeptide, as compared to a parent polypeptide.

[0847] In certain embodiments, an alteration or mutation is introduced to the parent polypeptide sequence to produce a variant Cas12i2 polypeptide that (a) enhances enzymatic activity, and (b) enhances binary complex formation, RNA guide binding activity, and/or RNA guide binding specificity. In certain embodiments, variant Cas12i2 polypeptide includes at least one alteration that promotes RNA guide complex formation, RNA guide binding activity, and/or RNA guide binding specificity as well as enzymatic activity of the variant Cas12i2 polypeptide, as compared to a parent polypeptide.

[0848] In certain embodiments, an alteration or mutation is introduced to the parent polypeptide sequence to produce a variant Cas12i2 polypeptide that (a) lacks enzymatic activity, yet (b) retains enhanced binary complex formation, RNA guide binding activity, and/or RNA guide binding specificity. In certain embodiments, variant Cas12i2 polypeptide includes at least one alteration that promotes binary complex formation, RNA guide binding activity, and/or RNA guide binding specificity, but not enzymatic activity of the variant Cas12i2 polypeptide, as compared to a parent polypeptide.

[0849] In certain embodiments, an alteration or mutation is introduced to the parent polypeptide sequence to produce a variant Cas12i2 polypeptide that (a) enhances enzymatic activity, and (b) enhances on-target ternary complex formation, on-target binding affinity, on-target binding activity, and/or on-target binding specificity. In certain embodiments, variant Cas12i2 polypeptide includes at least one alteration that promotes on-target ternary complex formation, on-target binding affinity, on-target binding activity, and/or on-target binding specificity as well as enzymatic activity of the variant Cas12i2 polypeptide, as compared to a parent polypeptide.

[0850] In certain embodiments, an alteration or mutation is introduced to the parent polypeptide sequence to produce a variant Cas12i2 polypeptide that (a) lacks enzymatic activity, yet (b) retains enhanced on-target ternary complex formation, on-target binding affinity, on-target binding activity, and/or on-target binding specificity. In certain embodiments, variant Cas12i2 polypeptide includes at least one alteration that promotes on-target ternary complex formation, on-target binding affinity, on-target binding activity, and/or on-target binding specificity, but not enzymatic activity of the variant Cas12i2 polypeptide, as compared to a parent polypeptide.

[0851] In some embodiments, at least one alteration is introduced into the parent polypeptide of SEQ ID NO: 2 to produce a variant Cas12i2 polypeptide that exhibits (a) decreased enzymatic activity and (b) enhanced RNA affinity relative to the parent polypeptide of SEQ ID NO: 2. In some embodiments, at least one alteration is introduced into the parent polypeptide of SEQ ID NO: 2 to produce a variant Cas12i2 polypeptide that exhibits (a) increased enzymatic activity and (b) enhanced RNA affinity, relative to the parent polypeptide of SEQ ID NO: 2. In some embodiments, at least one alteration is introduced into the parent polypeptide of SEQ ID NO: 2 to produce a variant Cas12i2 polypeptide that exhibits (a) retained enzymatic activity and (b) enhanced RNA affinity, relative to the parent polypeptide of SEQ ID NO: 2. In some embodiments, the variant Cas12i2 polypeptide having a feature as described herein comprises an amino acid sequence having at least about 60%, 65%, 70%, 75%, 80%, 85%, 90%, 91%, 92%, 93%, 94%, 95%, 96%, 97%, 98%, 99%, or 100% identity to any one of SEQ ID NOs: 3-146 and 495-512.

[0852] In some embodiments, at least one alteration is introduced into the parent polypeptide of SEQ ID NO: 2 to produce a variant Cas12i2 polypeptide that exhibits (a) decreased enzymatic activity and (b) enhanced binary complex formation relative to the parent polypeptide of SEQ ID NO: 2. In some embodiments, at least one alteration is introduced into the parent polypeptide of SEQ ID NO: 2 to produce a variant Cas12i2 polypeptide that exhibits (a) increased enzymatic activity and (b) enhanced binary complex formation, relative to the parent polypeptide of SEQ ID NO: 2. In some embodiments, at least one alteration is introduced into the parent polypeptide of SEQ ID NO: 2 to produce a variant Cas12i2 polypeptide that exhibits (a) retained enzymatic activity and (b) enhanced binary complex formation, relative to the parent polypeptide of SEQ ID NO: 2. In some embodiments, the variant Cas12i2 polypeptide having a feature as described herein comprises an amino acid sequence having at least about 60%, 65%, 70%, 75%, 80%, 85%, 90%, 91%, 92%, 93%, 94%, 95%, 96%, 97%, 98%, 99%, or 100% identity to any one of SEQ ID NOs: 3-146 and 495-512.

[0853] In some embodiments, at least one alteration is introduced into the parent polypeptide of SEQ ID NO: 2 to produce a variant Cas12i2 polypeptide that exhibits (a) decreased enzymatic activity and (b) enhanced RNA guide binding activity relative to the parent polypeptide of SEQ ID NO: 2. In some embodiments, at least one alteration is introduced into the parent polypeptide of SEQ ID NO: 2 to produce a variant Cas12i2 polypeptide that exhibits (a) increased enzymatic activity and (b) enhanced RNA guide binding activity, relative to the parent polypeptide of SEQ ID NO: 2. In some embodiments, at least one alteration is introduced into the parent polypeptide of SEQ ID NO: 2 to produce a variant Cas12i2 polypeptide that exhibits (a) retained enzymatic activity and (b) enhanced RNA guide binding activity, relative to the parent polypeptide of SEQ ID NO: 2. In some embodiments, the variant Cas12i2 polypeptide having a feature as described herein comprises an amino acid sequence having at least about 60%, 65%, 70%, 75%, 80%, 85%, 90%, 91%, 92%, 93%, 94%, 95%, 96%, 97%, 98%, 99%, or 100% identity to any one of SEQ ID NOs: 3-146 and 495-512.

[0854] In some embodiments, at least one alteration is introduced into the parent polypeptide of SEQ ID NO: 2 to produce a variant Cas12i2 polypeptide that exhibits (a) decreased enzymatic activity and (b) enhanced RNA guide binding specificity relative to the parent polypeptide of SEQ ID NO: 2. In some embodiments, at least one alteration is introduced into the parent polypeptide of SEQ ID NO: 2 to produce a variant Cas12i2 polypeptide that exhibits (a) increased enzymatic activity and (b) enhanced RNA guide binding specificity, relative to the parent polypeptide of SEQ ID NO: 2. In some embodiments, at least one alteration is introduced into the parent polypeptide of SEQ ID NO: 2 to produce a variant Cas12i2 polypeptide that exhibits (a) retained enzymatic activity and (b) enhanced RNA guide binding specificity, relative to the parent polypeptide of SEQ ID NO: 2. In some embodiments, the variant Cas12i2 polypeptide having a feature as described herein comprises an amino acid sequence having at least about 60%, 65%, 70%, 75%, 80%, 85%, 90%, 91%, 92%, 93%, 94%, 95%, 96%, 97%, 98%, 99%, or 100% identity to any one of SEQ ID NOs: 3-146 and 495-512.

[0855] In some embodiments, at least one alteration is introduced into the parent polypeptide of SEQ ID NO: 2 to produce a variant Cas12i2 polypeptide that exhibits (a) decreased enzymatic activity and (b) enhanced protein-RNA interactions relative to the parent polypeptide of SEQ ID NO: 2. In some embodiments, at least one alteration is introduced into the parent polypeptide of SEQ ID NO: 2 to produce a variant Cas12i2 polypeptide that exhibits (a) increased enzymatic activity and (b) enhanced protein-RNA interactions, relative to the parent polypeptide of SEQ ID NO: 2. In some embodiments, at least one alteration is introduced into the parent polypeptide of SEQ ID NO: 2 to produce a variant Cas12i2 polypeptide that exhibits (a) retained enzymatic activity and (b) enhanced protein-RNA interactions, relative to the parent polypeptide of SEQ ID NO: 2. In some embodiments, the variant Cas12i2 polypeptide having a feature as described herein comprises an amino acid sequence having at least about 60%, 65%, 70%, 75%, 80%, 85%, 90%, 91%, 92%, 93%, 94%, 95%, 96%, 97%, 98%, 99%, or 100% identity to any one of SEQ ID NOs: 3-146 and 495-512.

[0856] In some embodiments, at least one alteration is introduced into the parent polypeptide of SEQ ID NO: 2 to produce a variant Cas12i2 polypeptide that exhibits (a) decreased enzymatic activity and (b) enhanced protein stability relative to the parent polypeptide of SEQ ID NO: 2. In some embodiments, at least one alteration is introduced into the parent polypeptide of SEQ ID NO: 2 to produce a variant Cas12i2 polypeptide that exhibits (a) increased enzymatic activity and (b) enhanced protein stability, relative to the parent polypeptide of SEQ ID NO: 2. In some embodiments, at least one alteration is introduced into the parent polypeptide of SEQ ID NO: 2 to produce a variant Cas12i2 polypeptide that exhibits (a) retained enzymatic activity and (b) enhanced protein stability, relative to the parent polypeptide of SEQ ID NO: 2. In some embodiments, the variant Cas12i2 polypeptide having a feature as described herein comprises an amino acid sequence having at least about 60%, 65%, 70%, 75%, 80%, 85%, 90%, 91%, 92%, 93%, 94%, 95%, 96%, 97%, 98%, 99%, or 100% identity to any one of SEQ ID NOs: 3-146 and 495-512.

[0857] In some embodiments, at least one alteration is introduced into the parent polypeptide of SEQ ID NO: 2 to produce a variant Cas12i2 polypeptide that exhibits (a) decreased enzymatic activity and (b) decreased dissociation from an RNA guide relative to the parent polypeptide of SEQ ID NO: 2. In some embodiments, at least one alteration is introduced into the parent polypeptide of SEQ ID NO: 2 to produce a variant Cas12i2 polypeptide that exhibits (a) increased enzymatic activity and (b) decreased dissociation from an RNA guide, relative to the parent polypeptide of SEQ ID NO: 2. In some embodiments, at least one alteration is introduced into the parent polypeptide of SEQ ID NO: 2 to produce a variant Cas12i2 polypeptide that exhibits (a) retained enzymatic activity and (b) decreased dissociation from an RNA guide, relative to the parent polypeptide of SEQ ID NO: 2. In some embodiments, the variant Cas12i2 polypeptide having a feature as described herein comprises an amino acid sequence having at least about 60%, 65%, 70%, 75%, 80%, 85%, 90%, 91%, 92%, 93%, 94%, 95%, 96%, 97%, 98%, 99%, or 100% identity to any one of SEQ ID NOs: 3-146 and 495-512.

[0858] In some embodiments, at least one alteration is introduced into the parent polypeptide of SEQ ID NO: 2 to produce a variant Cas12i2 polypeptide that exhibits (a) decreased enzymatic activity and (b) enhanced ternary complex formation relative to the parent polypeptide of SEQ ID NO: 2. In some embodiments, at least one alteration is introduced into the parent polypeptide of SEQ ID NO: 2 to produce a variant Cas12i2 polypeptide that exhibits (a) increased enzymatic activity and (b) enhanced ternary complex formation, relative to the parent polypeptide of SEQ ID NO: 2. In some embodiments, at least one alteration is introduced into the parent polypeptide of SEQ ID NO: 2 to produce a variant Cas12i2 polypeptide that exhibits (a) retained enzymatic activity and (b) enhanced ternary complex formation, relative to the parent polypeptide of SEQ ID NO: 2. In some embodiments, the variant Cas12i2 polypeptide having a feature as described herein comprises an amino acid sequence having at least about 60%, 65%, 70%, 75%, 80%, 85%, 90%, 91%, 92%, 93%, 94%, 95%, 96%, 97%, 98%, 99%, or 100% identity to any one of SEQ ID NOs: 3-146 and 495-512.

[0859] In some embodiments, at least one alteration is introduced into the parent polypeptide of SEQ ID NO: 2 to produce a variant Cas12i2 polypeptide that forms a variant binary complex exhibiting (a) decreased enzymatic activity and (b) enhanced binding affinity to a target nucleic acid, relative to a parent binary complex comprising the polypeptide of SEQ ID NO: 2. In some embodiments, at least one alteration is introduced into the parent polypeptide of SEQ ID NO: 2 to produce a variant Cas12i2 polypeptide that forms a variant binary complex exhibiting (a) increased enzymatic activity and (b) enhanced binding affinity to a target nucleic acid, relative to a parent binary complex comprising the polypeptide of SEQ ID NO: 2. In some embodiments, at least one alteration is introduced into the parent polypeptide of SEQ ID NO: 2 to produce a variant Cas12i2 polypeptide that forms a variant binary complex that exhibits (a) retained enzymatic activity and (b) enhanced binding affinity to a target nucleic acid, relative to a parent binary complex comprising the polypeptide of SEQ ID NO: 2. In some embodiments, the variant Cas12i2 polypeptide having a feature as described herein comprises an amino acid sequence having at least about 60%, 65%, 70%, 75%, 80%, 85%, 90%, 91%, 92%, 93%, 94%, 95%, 96%, 97%, 98%, 99%, or 100% identity to any one of SEQ ID NOs: 3-146 and 495-512.

[0860] In some embodiments, at least one alteration is introduced into the parent polypeptide of SEQ ID NO: 2 to produce a variant Cas12i2 polypeptide that forms a variant binary complex exhibiting (a) decreased enzymatic activity and (b) enhanced on-target binding activity, relative to a parent binary complex comprising the polypeptide of SEQ ID NO: 2. In some embodiments, at least one alteration is introduced into the parent polypeptide of SEQ ID NO: 2 to produce a variant Cas12i2 polypeptide that forms a variant binary complex exhibiting (a) increased enzymatic activity and (b) enhanced on-target binding activity, relative to a parent binary complex comprising the polypeptide of SEQ ID NO: 2. In some embodiments, at least one alteration is introduced into the parent polypeptide of SEQ ID NO: 2 to produce a variant Cas12i2 polypeptide that forms a variant binary complex that exhibits (a) retained enzymatic activity and (b) enhanced on-target binding activity, relative to a parent binary complex comprising the polypeptide of SEQ ID NO: 2. In some embodiments, the variant Cas12i2 polypeptide having a feature as described herein comprises an amino acid sequence having at least about 60%, 65%, 70%, 75%, 80%, 85%, 90%, 91%, 92%, 93%, 94%, 95%, 96%, 97%, 98%, 99%, or 100% identity to any one of SEQ ID NOs: 3-146 and 495-512.

[0861] In some embodiments, at least one alteration is introduced into the parent polypeptide of SEQ ID NO: 2 to produce a variant Cas12i2 polypeptide that forms a variant binary complex exhibiting (a) decreased enzymatic activity and (b) enhanced on-target binding specificity, relative to a parent binary complex comprising the polypeptide of SEQ ID NO: 2. In some embodiments, at least one alteration is introduced into the parent polypeptide of SEQ ID NO: 2 to produce a variant Cas12i2 polypeptide that forms a variant binary complex exhibiting (a) increased enzymatic activity and (b) enhanced on-target binding specificity, relative to a parent binary complex comprising the polypeptide of SEQ ID NO: 2. In some embodiments, at least one alteration is introduced into the parent polypeptide of SEQ ID NO: 2 to produce a variant Cas12i2 polypeptide that forms a variant binary complex that exhibits (a) retained enzymatic activity and (b) enhanced on-target binding specificity, relative to a parent binary complex comprising the polypeptide of SEQ ID NO: 2. In some embodiments, the variant Cas12i2 polypeptide having a feature as described herein comprises an amino acid sequence having at least about 60%, 65%, 70%, 75%, 80%, 85%, 90%, 91%, 92%, 93%, 94%, 95%, 96%, 97%, 98%, 99%, or 100% identity to any one of SEQ ID NOs: 3-146 and 495-512.

[0862] In some embodiments, at least one alteration is introduced into the parent polypeptide of SEQ ID NO: 2 to produce a variant Cas12i2 polypeptide that forms a variant binary complex exhibiting (a) decreased enzymatic activity and (b) decreased off-target binding to a non-target nucleic acid, relative to a parent binary complex comprising the polypeptide of SEQ ID NO: 2. In some embodiments, at least one alteration is introduced into the parent polypeptide of SEQ ID NO: 2 to produce a variant Cas12i2 polypeptide that forms a variant binary complex exhibiting (a) increased enzymatic activity and (b) decreased off-target binding to a non-target nucleic acid, relative to a parent binary complex comprising the polypeptide of SEQ ID NO: 2. In some embodiments, at least one alteration is introduced into the parent polypeptide of SEQ ID NO: 2 to produce a variant Cas12i2 polypeptide that forms a variant binary complex exhibiting (a) retained enzymatic activity and (b) decreased off-target binding to a non-target nucleic acid, relative to a parent binary complex comprising the polypeptide of SEQ ID NO: 2. In some embodiments, the variant Cas12i2 polypeptide having a feature as described herein comprises an amino acid sequence having at least about 60%, 65%, 70%, 75%, 80%, 85%, 90%, 91%, 92%, 93%, 94%, 95%, 96%, 97%, 98%, 99%, or 100% identity to any one of SEQ ID NOs: 3-146 and 495-512.

[0863] In some embodiments, at least one alteration is introduced into the parent polypeptide of SEQ ID NO: 2 to produce a variant Cas12i2 polypeptide that forms a variant binary complex exhibiting (a) decreased enzymatic activity and (b) decreased dissociation from the target nucleic acid, relative to a parent binary complex comprising the polypeptide of SEQ ID NO: 2. In some embodiments, at least one alteration is introduced into the parent polypeptide of SEQ ID NO: 2 to produce a variant Cas12i2 polypeptide that forms a variant binary complex exhibiting (a) increased enzymatic activity and (b) decreased dissociation from the target nucleic acid, relative to a parent binary complex comprising the polypeptide of SEQ ID NO: 2. In some embodiments, at least one alteration is introduced into the parent polypeptide of SEQ ID NO: 2 to produce a variant Cas12i2 polypeptide that forms a variant binary complex exhibiting (a) retained enzymatic activity and (b) decreased dissociation from the target nucleic acid, relative to a parent binary complex comprising the polypeptide of SEQ ID NO: 2. In some embodiments, the variant Cas12i2 polypeptide having a feature as described herein comprises an amino acid sequence having at least about 60%, 65%, 70%, 75%, 80%, 85%, 90%, 91%, 92%, 93%, 94%, 95%, 96%, 97%, 98%, 99%, or 100% identity to any one of SEQ ID NOs: 3-146 and 495-512.

### Variant Binary Complexing

[0864] Generally, the variant Cas12i2 polypeptide and the RNA guide bind to each other in a molar ratio of about 1:1 to form the variant binary complex. The variant Cas12i2 polypeptide and the RNA guide, either alone or together, do not naturally occur.

[0865] In some embodiments, the variant Cas12i2 polypeptide can be overexpressed in a host cell and purified as described herein, then complexed with the RNA guide (e.g., in a test tube) to form a variant effector RNP (e.g., variant binary complex).

[0866] In some embodiments, the variant binary complex exhibits increased binding affinity to a target nucleic acid, increased on-target binding activity, increased on-target binding specificity, increased ternary complex formation with a target nucleic acid, and/or increased stability over a range of incubation times. In some embodiments, the variant binary complex exhibits decreased off-target binding to a non-target nucleic acid and/or decreased dissociation from a target nucleic acid over a range of incubation times. In some embodiments, the variant binary complex exhibits increased target nucleic acid complex formation, target nucleic acid activity, and/or target nucleic acid specificity over a range of incubation times.

[0867] In some embodiments, complexation of a binary complex may occur at a temperature in the range of about 20° C. to about 55° C., e.g., about any one of 20° C., 21° C., 22° C., 23° C., 24° C., 25° C., 26° C., 27° C., 28° C., 29° C., 30° C., 31° C., 32° C., 33° C., 34° C., 35° C., 36° C., 37° C., 38° C., 39° C., 40° C., 41° C., 42° C., 43° C., 44° C., 45° C., 50° C., or 55° C. In some embodiments, the variant Cas12i2 polypeptide does not dissociate from the RNA guide or bind to a free RNA at about 37° C. over an incubation period of at least about any one of 10 mins, 15 mins, 20 mins, 25 mins, 30 mins, 35 mins, 40 mins, 45 mins, 50 mins, 55 mins, 1 hr, 2 hr, 3 hr, 4 hr, or more hours. In some embodiments, after binary complex formation, the variant effector ribonucleoprotein complex does not exchange the RNA guide with a different RNA.

[0868] In some embodiments, the variant Cas12i2 polypeptide and RNA guide are complexed in a binary complexation buffer. In some embodiments, the variant Cas12i2 polypeptide is stored in a buffer that is replaced with a binary complexation buffer to form a complex with the RNA guide. In some embodiments, the variant Cas12i2 polypeptide is stored in a binary complexation buffer.

[0869] In some embodiments, the binary complexation buffer has a pH in a range of about 7.3 to 8.6. In one embodiment, the pH of the binary complexation buffer is about 7.3. In one embodiment, the pH of the binary complexation buffer is about 7.4. In one embodiment, the pH of the binary complexation buffer is about 7.5. In one embodiment, the pH of the binary complexation buffer is about 7.6. In one embodiment, the pH of the binary complexation buffer is about 7.7. In one embodiment, the pH of the binary complexation buffer is about 7.8. In one embodiment, the pH of the binary complexation buffer is about 7.9. In one embodiment, the pH of the binary complexation buffer is about 8.0. In one embodiment, the pH of the binary complexation buffer is about 8.1. In one embodiment, the pH of the binary complexation buffer is about 8.2. In one embodiment, the pH of the binary complexation buffer is about 8.3. In one embodiment, the pH of the binary complexation buffer is about 8.4. In one embodiment, the pH of the binary complexation buffer is about 8.5. In one embodiment, the pH of the binary complexation buffer is about 8.6.

[0870] The thermostability of the variant Cas12i2 polypeptide can increase under favorable conditions such as the addition of an RNA guide, e.g., binding an RNA guide.

[0871] In some embodiments, the variant Cas12i2 polypeptide can be overexpressed and complexed with the RNA guide in a host cell prior to purification as described herein. In some embodiments, mRNA or DNA encoding the variant Cas12i2 polypeptide is introduced into a cell so that the variant Cas12i2 polypeptide is expressed in the cell. The RNA guide, which guides the variant Cas12i2 polypeptide to the desired target nucleic acid is also introduced into the cell, whether simultaneously, separately or sequentially from a single mRNA or DNA construct, such that the necessary ribonucleoprotein complex is formed in the cell.

### Assessing Variant Binary Complex Stability and Functionality

[0872] Provided herein in certain embodiments are methods for identifying an optimal variant Cas12i2 polypeptide/RNA guide complex (referred to herein as the variant binary complex) including (a) combining a variant Cas12i2 polypeptide and an RNA guide in a sample to form the variant binary complex; (b) measuring a value of the variant binary complex; and (c) determining the variant binary complex is optimal over the reference molecule, if the value of the variant binary complex is greater than a value of a reference molecule. In some embodiments, the value may include, but is not limited to, a stability measurement (e.g., Tₘ value, thermostability), a rate of binary complex formation, RNA guide binding specificity, and/or complex activity.

[0873] In some embodiments, an optimal variant Cas12i2 polypeptide/RNA guide complex (i.e., a variant binary complex) is identified by the steps of: (a) combining a variant Cas12i2 polypeptide and an RNA guide in a sample to form the variant binary complex; (b) detecting a Tₘ value of the variant binary complex; and (c) determining the variant binary complex is stable if the Tₘ value of the variant binary complex is greater than a Tₘ value of a reference molecule or a Tₘ reference value by at least 8° C.

[0874] The methods involving a step of measuring the thermostability of a variant Cas12i2 polypeptide/RNA guide complex (i.e., a variant binary complex) may include, without limitation, methods of determining the stability of a variant binary complex, methods of determining a condition that promotes a stable variant binary complex, methods of screening for a stable variant binary complex, and methods for identifying an optimal gRNA to form a stable variant binary complex. In certain embodiments, a thermostability value of a variant binary complex may be measured.

[0875] Additionally, in certain embodiments, a thermostability value of a reference molecule may also be measured. In certain embodiments, a variant binary complex may be determined to be stable if the measured thermostability value of the variant binary complex is greater than the measured thermostability value of the reference molecule or a thermostability reference value, measured under the same experimental conditions, as described herein. In certain embodiments, the reference molecule may be the variant Cas12i2 polypeptide absent an RNA guide.

[0876] In certain embodiments, the thermostability value that is measured may be a denaturation temperature value. In these embodiments, the thermostability reference value is a denaturation temperature reference value. In certain embodiments, the thermostability value that is measured may be a Tₘ value. In these embodiments, the thermostability reference value may be a Tₘ reference value. In certain embodiments, the thermostability value may be measured using a thermal shift assay. In certain embodiments, an assay used to measure thermostability may involve a technique described herein including, but not limited to, thermal denaturation assays, thermal shift assays, differential scanning calorimetry (DSC), differential scanning fluorimetry (DSF), isothermal titration calorimetry (ITC), pulse-chase methods, bleach-chase methods, cycloheximide-chase methods, circular dichroism (CD) spectroscopy, crystallization, and fluorescence-based activity assays.

[0877] In certain embodiments, a variant binary complex may be identified if the rate of variant Cas12i2 polypeptide/RNA guide complex formation, RNA guide binding specificity, and/or complex activity of the variant binary complex is greater than a value of the reference molecule or the reference value (e.g., a value of a parent polypeptide/RNA guide complex, referred to herein as a parent binary complex). For example, in certain embodiments, the variant binary complex may be identified if the value of a rate of variant Cas12i2 polypeptide/RNA guide complex formation, RNA guide binding specificity, and/or complex activity of the variant binary complex is at least X % greater than a value of the reference molecule or the reference value (e.g., a value of a parent binary complex). In certain embodiments, the methods described herein may further comprise steps that include measuring the activity of the variant binary complex as described herein.

### Variant Ternary Complexing

[0878] In some embodiments, the variant Cas12i2 polypeptide, RNA guide, and target nucleic acid, as described herein, form a variant ternary complex (e.g., in a test tube or cell). Generally, the variant Cas12i2 polypeptide, the RNA guide, and the target nucleic acid associate with each other in a molar ratio of about 1:1:1 to form the variant ternary complex. The variant Cas12i2 polypeptide, the RNA guide, and the target nucleic acid, either alone or together, do not naturally occur.

[0879] In some embodiments, the variant binary complex (e.g., complex of variant Cas12i2 polypeptide and RNA guide) as described herein, is further complexed with the target nucleic acid (e.g., in a test tube or cell) to form a variant ternary complex.

[0880] In some embodiments, complexation of the ternary complex occurs at a temperature in the range of about 20° C. to about 55° C., e.g., about any one of 20° C., 21° C., 22° C., 23° C., 24° C., 25° C., 26° C., 27° C., 28° C., 29° C., 30° C., 31° C., 32° C., 33° C., 34° C., 35° C., 36° C., 37° C., 38° C., 39° C., 40° C., 41° C., 42° C., 43° C., 44° C., 45° C., 50° C., or 55° C. In some embodiments, the variant binary complex does not dissociate from the target nucleic acid or bind to a free nucleic acid (e.g., free DNA) at about 37° C. over an incubation period of at least about any one of 10 mins, 15 mins, 20 mins, 25 mins, 30 mins, 35 mins, 40 mins, 45 mins, 50 mins, 55 mins, 1 hr, 2 hr, 3 hr, 4 hr, or more hours. In some embodiments, after ternary complex formation, a variant binary complex does not exchange the target nucleic acid with a different nucleic acid.

[0881] In some embodiments, the variant Cas12i2 polypeptide, RNA guide, and target nucleic acid are complexed in a ternary complexation buffer. In some embodiments, the variant Cas12i2 polypeptide is stored in a buffer that is replaced with a ternary complexation buffer to form a complex with the RNA guide and target nucleic acid. In some embodiments, the variant Cas12i2 polypeptide is stored in a ternary complexation buffer.

[0882] In some embodiments, the variant binary complex and target nucleic acid are complexed in a ternary complexation buffer. In some embodiments, the variant binary complex is stored in a buffer that is replaced with a ternary complexation buffer to form a complex with the target nucleic acid. In some embodiments, the variant binary complex is stored in a ternary complexation buffer.

[0883] In some embodiments, the ternary complexation buffer has a pH in a range of about 7.3 to 8.6. In one embodiment, the pH of the ternary complexation buffer is about 7.3. In one embodiment, the pH of the ternary complexation buffer is about 7.4. In one embodiment, the pH of the ternary complexation buffer is about 7.5. In one embodiment, the pH of the ternary complexation buffer is about 7.6. In one embodiment, the pH of the ternary complexation buffer is about 7.7. In one embodiment, the pH of the ternary complexation buffer is about 7.8. In one embodiment, the pH of the ternary complexation buffer is about 7.9. In one embodiment, the pH of the ternary complexation buffer is about 8.0. In one embodiment, the pH of the ternary complexation buffer is about 8.1. In one embodiment, the pH of the ternary complexation buffer is about 8.2. In one embodiment, the pH of the ternary complexation buffer is about 8.3. In one embodiment, the pH of the ternary complexation buffer is about 8.4. In one embodiment, the pH of the ternary complexation buffer is about 8.5. In one embodiment, the pH of the ternary complexation buffer is about 8.6.

[0884] The thermostability of a variant Cas12i2 polypeptide can increase under favorable conditions such as the addition of an RNA guide and target nucleic acid.

### Assessing Variant Ternary Complex Stability and Functionality

[0885] Provided herein in certain embodiments are methods for identifying an optimal variant ternary complex including (a) combining a variant Cas12i2 polypeptide, an RNA guide, and a target nucleic acid in a sample to form the variant ternary complex; (b) measuring a value of the variant ternary complex; and (c) determining the variant ternary complex is optimal over the reference molecule, if the value of the variant ternary complex is greater than a value of a reference molecule. In some embodiments, the value may include, but is not limited to, a stability measurement (e.g., Tₘ value, thermostability), a rate of ternary complex formation, a DNA binding affinity measurement, a DNA binding specificity measurement, and/or a complex activity measurement (e.g., nuclease activity measurement).

[0886] In some embodiments, an optimal variant ternary complex is identified by the steps of: (a) combining a variant Cas12i2 polypeptide, an RNA guide, and a target nucleic acid in a sample to form the variant ternary complex; (b) detecting a Tₘ value of the variant ternary complex; and (c) determining the variant ternary complex is stable if the Tₘ value of the variant ternary complex is greater than a Tₘ value of a reference molecule or a Tₘ reference value by at least 8° C.

[0887] The methods involving a step of measuring the thermostability of a variant ternary complex may include, without limitation, methods of determining the stability of a variant ternary complex, methods of determining a condition that promotes a stable variant ternary complex, methods of screening for a stable variant ternary complex, and methods for identifying an optimal binary complex to form a stable variant ternary complex. In certain embodiments, a thermostability value of a variant ternary complex may be measured.

[0888] Additionally, in certain embodiments, a thermostability value of a reference molecule may also be measured. In certain embodiments, a variant ternary complex may be determined to be stable if the measured thermostability value of the variant ternary complex is greater than the measured thermostability value of the reference molecule or a thermostability reference value, measured under the same experimental conditions, as described herein. In certain embodiments, the reference molecule may be the variant Cas12i2 polypeptide absent an RNA guide and/or target nucleic acid.

[0889] In certain embodiments, the thermostability value that is measured may be a denaturation temperature value. In these embodiments, the thermostability reference value is a denaturation temperature reference value. In certain embodiments, the thermostability value that is measured may be a Tₘ value. In these embodiments, the thermostability reference value may be a Tₘ reference value. In certain embodiments, the thermostability value may be measured using a thermal shift assay. In certain embodiments, an assay used to measure thermostability may involve a technique described herein including, but not limited to, differential scanning fluorimetry (DSF), differential scanning calorimetry (DSC), or isothermal titration calorimetry (ITC).

[0890] In certain embodiments, a variant ternary complex may be identified if the rate of ternary complex formation, DNA binding affinity, DNA binding specificity, and/or complex activity (e.g., nuclease activity) of the variant ternary complex is greater than a value of the reference molecule or the reference value (e.g., a value of a parent ternary complex). For example, in certain embodiments, the variant ternary complex may be identified if the value of a rate of ternary complex formation, DNA binding affinity, DNA binding specificity, and/or complex activity of the variant ternary complex is at least X % greater than a value of the reference molecule or the reference value (e.g., a value of a parent ternary complex). In certain embodiments, the methods described herein may further comprise steps that include measuring the activity of the variant ternary complex as described herein.

### Delivery

[0891] Compositions or complexes described herein may be formulated, for example, including a carrier, such as a carrier and/or a polymeric carrier, e.g., a liposome, and delivered by known methods to a cell (e.g., a prokaryotic, eukaryotic, plant, mammalian, etc.). Such methods include, but not limited to, transfection (e.g., lipid-mediated, cationic polymers, calcium phosphate, dendrimers); electroporation or other methods of membrane disruption (e.g., nucleofection), viral delivery (e.g., lentivirus, retrovirus, adenovirus, AAV), microinjection, microprojectile bombardment (“gene gun”), fugene, direct sonic loading, cell squeezing, optical transfection, protoplast fusion, impalefection, magnetofection, exosome-mediated transfer, lipid nanoparticle-mediated transfer, and any combination thereof.

[0892] In some embodiments, the method comprises delivering one or more nucleic acids (e.g., nucleic acids encoding the variant Cas12i2 polypeptide, RNA guide, donor DNA, etc.), one or more transcripts thereof, and/or a pre-formed variant Cas12i2 polypeptide/RNA guide complex (i.e., variant binary complex) to a cell. Exemplary intracellular delivery methods, include, but are not limited to: viruses or virus-like agents; chemical-based transfection methods, such as those using calcium phosphate, dendrimers, liposomes, or cationic polymers (e.g., DEAE-dextran or polyethylenimine); non-chemical methods, such as microinjection, electroporation, cell squeezing, sonoporation, optical transfection, impalefection, protoplast fusion, bacterial conjugation, delivery of plasmids or transposons; particle-based methods, such as using a gene gun, magnetofection or magnet assisted transfection, particle bombardment; and hybrid methods, such as nucleofection. In some embodiments, the present application further provides cells produced by such methods, and organisms (such as animals, plants, or fungi) comprising or produced from such cells.

### Cells

[0893] Compositions or complexes described herein may be delivered to a variety of cells. In some embodiments, the cell is an isolated cell. In some embodiments the cell is in cell culture. In some embodiments, the cell is ex vivo. In some embodiments, the cell is obtained from a living organism, and maintained in a cell culture. In some embodiments, the cell is a single-cellular organism.

[0894] In some embodiments, the cell is a prokaryotic cell. In some embodiments, the cell is a bacterial cell or derived from a bacterial cell. In some embodiments, the bacterial cell is not related to the bacterial species from which the parent polypeptide is derived. In some embodiments, the cell is an archaeal cell or derived from an archaeal cell. In some embodiments, the cell is a eukaryotic cell. In some embodiments, the cell is a plant cell or derived from a plant cell. In some embodiments, the cell is a fungal cell or derived from a fungal cell. In some embodiments, the cell is an animal cell or derived from an animal cell. In some embodiments, the cell is an invertebrate cell or derived from an invertebrate cell. In some embodiments, the cell is a vertebrate cell or derived from a vertebrate cell. In some embodiments, the cell is a mammalian cell or derived from a mammalian cell. In some embodiments, the cell is a human cell. In some embodiments, the cell is a zebra fish cell. In some embodiments, the cell is a rodent cell. In some embodiments, the cell is synthetically made, sometimes termed an artificial cell.

[0895] In some embodiments, the cell is derived from a cell line. A wide variety of cell lines for tissue culture are known in the art. Examples of cell lines include, but are not limited to, 293T, MF7, K562, HeLa, and transgenic varieties thereof. Cell lines are available from a variety of sources known to those with skill in the art (see, e.g., the American Type Culture Collection (ATCC) (Manassas, Va.)). In some embodiments, a cell transfected with one or more nucleic acids (such as Ago-coding vector and gDNA) or Ago-gDNA complex described herein is used to establish a new cell line comprising one or more vector-derived sequences to establish a new cell line comprising modification to the target nucleic acid. In some embodiments, cells transiently or non-transiently transfected with one or more nucleic acids (such as variant Cas12i2 polypeptide-encoding vector and RNA guide) or variant Cas12i2 polypeptide/RNA guide complex (i.e., variant binary complex) described herein, or cell lines derived from such cells are used in assessing one or more test compounds.

[0896] In some embodiments, the cell is a primary cell. For example, cultures of primary cells can be passaged 0 times, 1 time, 2 times, 4 times, 5 times, 10 times, 15 times or more. In some embodiments, the primary cells are harvest from an individual by any known method. For example, leukocytes may be harvested by apheresis, leukocytapheresis, density gradient separation, etc. Cells from tissues such as skin, muscle, bone marrow, spleen, liver, pancreas, lung, intestine, stomach, etc. can be harvested by biopsy. An appropriate solution may be used for dispersion or suspension of the harvested cells. Such solution can generally be a balanced salt solution, (e.g. normal saline, phosphate-buffered saline (PBS), Hank's balanced salt solution, etc.), conveniently supplemented with fetal calf serum or other naturally occurring factors, in conjunction with an acceptable buffer at low concentration. Buffers can include HEPES, phosphate buffers, lactate buffers, etc. Cells may be used immediately, or they may be stored (e.g., by freezing). Frozen cells can be thawed and can be capable of being reused. Cells can be frozen in a DMSO, serum, medium buffer (e.g., 10% DMSO, 50% serum, 40% buffered medium), and/or some other such common solution used to preserve cells at freezing temperatures.

[0897] In some embodiments, the variant Cas12i2 polypeptide has nuclease activity that induces double-stranded breaks or single-stranded breaks in a target nucleic acid, (e.g. genomic DNA). The double-stranded break can stimulate cellular endogenous DNA-repair pathways, including Homology Directed Recombination (HDR), Non-Homologous End Joining (NHEJ), or Alternative Non-Homologues End-Joining (A-NHEJ). NHEJ can repair cleaved target nucleic acid without the need for a homologous template. This can result in deletion or insertion of one or more nucleotides into the target nucleic acid. HDR can occur with a homologous template, such as the donor DNA. The homologous template can comprise sequences that are homologous to sequences flanking the target nucleic acid cleavage site. In some cases, HDR can insert an exogenous polynucleotide sequence into the cleaved target nucleic acid. The modifications of the target DNA due to NHEJ and/or HDR can lead to, for example, mutations, deletions, alterations, integrations, gene correction, gene replacement, gene tagging, transgene knock-in, gene disruption, and/or gene knock-outs.

[0898] In some embodiments, the cell culture is synchronized to enhance the efficiency of the methods. In some embodiments, cells in S and G2 phases are used for HDR-mediated gene editing. In some embodiments, the cell can be subjected to the method at any cell cycle. In some embodiments, cell over-plating significantly reduces the efficacy of the method. In some embodiments, the method is applied to a cell culture at no more than about any one of 40%, 45%, 50%, 55%, 60%, 65%, or 70% confluency.

[0899] In some embodiments, binding of the variant Cas12i2 polypeptide/RNA guide complex (i.e., variant binary complex) to the target nucleic acid in the cell recruits one or more endogenous cellular molecules or pathways other than DNA repair pathways to modify the target nucleic acid. In some embodiments, binding of the variant binary complex blocks access of one or more endogenous cellular molecules or pathways to the target nucleic acid, thereby modifying the target nucleic acid. For example, binding of the variant binary complex may block endogenous transcription or translation machinery to decrease the expression of the target nucleic acid.

[0900] In some embodiments, delivery of a variant Cas12i2 polypeptide does not substantially affect viability of the cell. In some embodiments, a cell remains viable following delivery of a variant Cas12i2 polypeptide. In some embodiments, a cell remains viable at least 1 hour, 2 hours, 3 hours, 4 hours, 5 hours, 6 hours, 7 hours, 8 hours, 9 hours, 10 hours, 11 hours, 12 hours, 13 hours, 14 hours, 15 hours, 16 hours, 17 hours, 18 hours, 19 hours, 20 hours, 21 hours, 22 hours, 23 hours, 24 hours, 36 hours, 48 hours, 60 hours, 72 hours, or more following delivery of a variant Cas12i2 polypeptide. In some embodiments, at least 70% (e.g., 71%, 72%, 73% 74%, 75%, 76%, 77%, 78%, 79%, 80%, 81%, 82%, 83%, 84%, 85%, 86%, 87%, 88%, 89%, 90%, 91%, 92%, 93%, 94%, 95%, 96%, 97%, 98%, 99%, or 100%) of a plurality of cells remain viable following delivery of a variant Cas12i2 polypeptide. In some embodiments, at least 70% (e.g., 71%, 72%, 73% 74%, 75%, 76%, 77%, 78%, 79%, 80%, 81%, 82%, 83%, 84%, 85%, 86%, 87%, 88%, 89%, 90%, 91%, 92%, 93%, 94%, 95%, 96%, 97%, 98%, 99%, or 100%) of a plurality of cells remain viable at least 1 hour, 2 hours, 3 hours, 4 hours, 5 hours, 6 hours, 7 hours, 8 hours, 9 hours, 10 hours, 11 hours, 12 hours, 13 hours, 14 hours, 15 hours, 16 hours, 17 hours, 18 hours, 19 hours, 20 hours, 21 hours, 22 hours, 23 hours, 24 hours, 36 hours, 48 hours, 60 hours, 72 hours, or more following delivery of a variant Cas12i2 polypeptide. In some embodiments, at least 80% (e.g., 80%, 81%, 82%, 83%, 84%, 85%, 86%, 87%, 88%, 89%, 90%, 91%, 92%, 93%, 94%, 95%, 96%, 97%, 98%, 99%, or 100%) of a plurality of cells remain viable following delivery of a variant Cas12i2 polypeptide. In some embodiments, at least 80% (e.g., 80%, 81%, 82%, 83%, 84%, 85%, 86%, 87%, 88%, 89%, 90%, 91%, 92%, 93%, 94%, 95%, 96%, 97%, 98%, 99%, or 100%) of a plurality of cells remain viable at least 1 hour, 2 hours, 3 hours, 4 hours, 5 hours, 6 hours, 7 hours, 8 hours, 9 hours, 10 hours, 11 hours, 12 hours, 13 hours, 14 hours, 15 hours, 16 hours, 17 hours, 18 hours, 19 hours, 20 hours, 21 hours, 22 hours, 23 hours, 24 hours, 36 hours, 48 hours, 60 hours, 72 hours, or more following delivery of a variant Cas12i2 polypeptide. In some embodiments, at least 90% (e.g., 90%, 91%, 92%, 93%, 94%, 95%, 96%, 97%, 98%, 99%, or 100%) of a plurality of cells remain viable following delivery of a variant Cas12i2 polypeptide. In some embodiments, at least 90% (e.g., 90%, 91%, 92%, 93%, 94%, 95%, 96%, 97%, 98%, 99%, or 100%) of a plurality of cells remain viable at least 1 hour, 2 hours, 3 hours, 4 hours, 5 hours, 6 hours, 7 hours, 8 hours, 9 hours, 10 hours, 11 hours, 12 hours, 13 hours, 14 hours, 15 hours, 16 hours, 17 hours, 18 hours, 19 hours, 20 hours, 21 hours, 22 hours, 23 hours, 24 hours, 36 hours, 48 hours, 60 hours, 72 hours, or more following delivery of a variant Cas12i2 polypeptide.

[0901] In some embodiments, delivery of a variant Cas12i2 binary complex (e.g., RNP) does not substantially affect viability of the cell. In some embodiments, a cell remains viable following delivery of a variant Cas12i2 binary complex (e.g., RNP). In some embodiments, a cell remains viable at least 1 hour, 2 hours, 3 hours, 4 hours, 5 hours, 6 hours, 7 hours, 8 hours, 9 hours, 10 hours, 11 hours, 12 hours, 13 hours, 14 hours, 15 hours, 16 hours, 17 hours, 18 hours, 19 hours, 20 hours, 21 hours, 22 hours, 23 hours, 24 hours, 36 hours, 48 hours, 60 hours, 72 hours, or more following delivery of a variant Cas12i2 binary complex (e.g., RNP). In some embodiments, at least 70% (e.g., 71%, 72%, 73% 74%, 75%, 76%, 77%, 78%, 79%, 80%, 81%, 82%, 83%, 84%, 85%, 86%, 87%, 88%, 89%, 90%, 91%, 92%, 93%, 94%, 95%, 96%, 97%, 98%, 99%, or 100%) of a plurality of cells remain viable following delivery of a variant Cas12i2 binary complex (e.g., RNP). In some embodiments, at least 70% (e.g., 71%, 72%, 73% 74%, 75%, 76%, 77%, 78%, 79%, 80%, 81%, 82%, 83%, 84%, 85%, 86%, 87%, 88%, 89%, 90%, 91%, 92%, 93%, 94%, 95%, 96%, 97%, 98%, 99%, or 100%) of a plurality of cells remain viable at least 1 hour, 2 hours, 3 hours, 4 hours, 5 hours, 6 hours, 7 hours, 8 hours, 9 hours, 10 hours, 11 hours, 12 hours, 13 hours, 14 hours, 15 hours, 16 hours, 17 hours, 18 hours, 19 hours, 20 hours, 21 hours, 22 hours, 23 hours, 24 hours, 36 hours, 48 hours, 60 hours, 72 hours, or more following delivery of a variant Cas12i2 binary complex (e.g., RNP). In some embodiments, at least 80% (e.g., 80%, 81%, 82%, 83%, 84%, 85%, 86%, 87%, 88%, 89%, 90%, 91%, 92%, 93%, 94%, 95%, 96%, 97%, 98%, 99%, or 100%) of a plurality of cells remain viable following delivery of a variant Cas12i2 binary complex (e.g., RNP). In some embodiments, at least 80% (e.g., 80%, 81%, 82%, 83%, 84%, 85%, 86%, 87%, 88%, 89%, 90%, 91%, 92%, 93%, 94%, 95%, 96%, 97%, 98%, 99%, or 100%) of a plurality of cells remain viable at least 1 hour, 2 hours, 3 hours, 4 hours, 5 hours, 6 hours, 7 hours, 8 hours, 9 hours, 10 hours, 11 hours, 12 hours, 13 hours, 14 hours, 15 hours, 16 hours, 17 hours, 18 hours, 19 hours, 20 hours, 21 hours, 22 hours, 23 hours, 24 hours, 36 hours, 48 hours, 60 hours, 72 hours, or more following delivery of a variant Cas12i2 binary complex (e.g., RNP). In some embodiments, at least 90% (e.g., 90%, 91%, 92%, 93%, 94%, 95%, 96%, 97%, 98%, 99%, or 100%) of a plurality of cells remain viable following delivery of a variant Cas12i2 binary complex (e.g., RNP). In some embodiments, at least 90% (e.g., 90%, 91%, 92%, 93%, 94%, 95%, 96%, 97%, 98%, 99%, or 100%) of a plurality of cells remain viable at least 1 hour, 2 hours, 3 hours, 4 hours, 5 hours, 6 hours, 7 hours, 8 hours, 9 hours, 10 hours, 11 hours, 12 hours, 13 hours, 14 hours, 15 hours, 16 hours, 17 hours, 18 hours, 19 hours, 20 hours, 21 hours, 22 hours, 23 hours, 24 hours, 36 hours, 48 hours, 60 hours, 72 hours, or more following delivery of a variant Cas12i2 binary complex (e.g., RNP).

### Kits

[0902] The invention also provides kits that can be used, for example, to carry out a method described herein. In some embodiments, the kits include a variant Cas12i2 polypeptide of the invention, e.g., a variant comprising a substitution of Table 2 or a variant polypeptide of Table 3. In some embodiments, the kits include a polynucleotide that encodes such a variant Cas12i2 polypeptide, and optionally the polynucleotide is comprised within a vector, e.g., as described herein. The kits also can optionally include an RNA guide, e.g., as described herein. The RNA guide of the kits of the invention can be designed to target a sequence of interest, as is known in the art. The effector variant and the RNA guide can be packaged within the same vial or other vessel within a kit or can be packaged in separate vials or other vessels, the contents of which can be mixed prior to use. The kits can additionally include, optionally, a buffer and/or instructions for use of the effector variant and/or RNA guide.

[0903] All references and publications cited herein are hereby incorporated by reference.

### EXAMPLES

[0904] The following examples are provided to further illustrate some embodiments of the present invention but are not intended to limit the scope of the invention; it will be understood by their exemplary nature that other procedures, methodologies, or techniques known to those skilled in the art may alternatively be used.

### Example 1—Engineering of Cas12i2 Variant Constructs

[0905] In this Example, Cas12i2 variant constructs were generated.

[0906] DNA templates comprising single mutations were constructed via two PCR steps (FIG. 2) using mutagenic forward and mutagenic reverse primers ordered from IDT. In the first step, two sets of PCR reactions were conducted in 384 plates to generate two fragments. The overlapping regions of two PCR fragments contained the desired single mutations and allowed the assembly of the entire DNA template via a second PCR. In the second step, the purified fragments from the first step were used as the template for the overlapping PCR (OL PCR) and the Fw and Rv oligos annealing to the vector backbone as the OL PCR primers. The resulting linear DNA templates contained a T7 promoter, a T7 terminator, and the open-reading frame for the Cas12i2 effector.

[0907] These linear DNA templates were used directly in a cell-free transcription and translation system to express the Cas12i2 effector variants containing the single mutations. The variant constructs were further individually transferred into transient transfection vectors. Additionally, DNA templates comprising combinatorial mutations were prepared by PCR and subsequently transferred into transient transfection vectors.

### Example 2—Florescence Polarization Assay for Variant Cas12i2 Binary Complex Detection

[0908] In this Example, the ability of a Cas12i2 polypeptide (wild-type or variant Cas12i2) and an RNA guide to form a binary complex is assessed through a fluorescence polarization assay.

[0909] Linear ssDNA fragments comprising the reverse complement of the T7 RNA polymerase promoter sequence upstream of the mature Cas12i2 direct repeat sequence and desired 20 bp RNA guide target are synthesized by IDT. Linear dsDNA in vitro transcription (IVT) templates are then generated by annealing a universal T7 forward oligo (95-4° C. at 5° C./minute) to the reverse complement ssDNA and filled in with Klenow fragment (New England Biolabs) for 15 minutes at 25° C. The resulting IVT template is then transcribed into an RNA guide using the HiScribe T7 High Yield RNA Synthesis Kit (New England Biolabs) at 37° C. for 4 hours. Following transcription, each RNA guide is purified using an RNA Clean and Concentrator Kit (Zymo) and stored at −20° C. until use.

[0910] The RNA guide is then labeled with 6-carboxyfluorescein (6-FAM) (IDT). 25 nM Cas12i2 polypeptide (wild-type or variant Cas12i2) in 1× assay buffer (20 mM Tris-HCl (pH 7.5), 150 mM KCl, 5 mM MgCl₂, 1 mM DTT) is titrated with increasing concentrations of labeled RNA guide (7.5-250 nM). Complexes are incubated at 37° C. for 30 minutes before taking fluorescence polarization measurements using a microplate reader (Infinite 200 Pro, Tecan).

[0911] Binary complex formation at different temperatures is also investigated. Further binding experiments as described above are performed isothermally at 25, 50, 60, and 70° C.

[0912] Formation of a binary complex upon titration of a Cas12i2 polypeptide (wild-type or variant Cas12i2) with increasing concentrations of RNA guide (or formation of a binary complex upon titration of RNA guide with increasing concentrations of a Cas12i2 polypeptide) results in changes in fluorescence polarization signal, in millipolarization (mP) units. A binding curve is generated by plotting changes in fluorescence polarization signal over a range of RNA guide concentrations.

[0913] This Example indicates how binding affinities of Cas12i2 polypeptides (wild-type or variant Cas12i2) to RNA guides can be determined and compared.

### Example 3—RNA Electrophoretic Mobility Shift Assay for Variant Cas12i2 Binary Complex Detection

[0914] This Example describes use of an RNA EMSA to determine the ability of a Cas12i2 polypeptide (wild-type or variant) to bind to an RNA guide.

[0915] Synthetic RNA guides from IDT are labeled with a 5′ IR800 dye using 5′ EndTag Labeling Kit (Vector Labs) and IRDye 800CW Maleimide (LI-COR Biosciences), as previously detailed in Yan et al., 2018. After labeling, the RNA guides are cleaned and concentrated via phenol chloroform extraction. Concentrations are quantified by Nanodrop.

[0916] For RNA binding assays, Cas12i2 polypeptides (wild-type Cas12i2 or a variant Cas12i2) are diluted to 2.5 μM in 1× binding buffer (50 mM NaCl, 10 mM Tris-HCl, 10 mM MgCl₂, 1 mM DTT, pH 7.9. Polypeptides are then serially diluted from 2.5 μM to 37.5 μM in 1× binding buffer. The polypeptides are again diluted 1:10 in 1× binding buffer plus 50 nM IR800 labeled RNA guide and mixed thoroughly. These reactions can further include 0.5-5 μg tRNA, which serves as a competitive inhibitor to decrease nonspecific binding of polypeptide to RNA and thereby facilitate accurate specific binding determinations. Reactions are incubated at 37° C. for 1 hour. 1 μL 100× bromophenol blue is added to the reactions for dye front visualization, then the entire reaction is loaded onto a 6% DNA Retardation Gel (Thermofisher), which runs for 90 minutes at 80V. The gel is imaged on the Licor Odyssey CLx.

[0917] This assay relies on the principle that the rate at which RNA migrates through the gel is determined by its size. An RNA only sample is able to migrate a particular distance. However, if the RNA binds to a polypeptide, a band that represents a larger, less mobile RNA complex appears, which is “upshifted” on the gel.

[0918] Therefore, the intensities of two bands are measured: 1) an RNA only band and 2) a polypeptide-bound “upshifted” RNA band. If all RNA is bound to a polypeptide, only an upshifted band is observed. As the concentration of polypeptide decreases, the intensity of the upshifted band decreases, while the intensity of the RNA only band increases. In comparing RNA binding affinities for Cas12i2 polypeptides (wild-type or variant Cas12i2), a higher polypeptide/RNA affinity is characterized by more specific binding at lower concentrations of polypeptide.

[0919] This Example indicates how binding affinities of wild-type Cas12i2 to RNA guides and binding affinities of Cas12i2 variants to RNA guides can be determined and compared.

### Example 4—In Vitro Cleavage Assay for Variant Cas12i2 Binary Complexes

[0920] This Example describes methods for preparing Cas12i2 RNPs and for determining in vitro biochemical activity of Cas12i2 (wild-type or variant Cas12i2) RNPs.

[0921] Cas12i2 vectors are transformed into E. coli BL21 (DE3) (New England BioLabs) and expressed under a T7 promoter. Transformed cells are initially grown overnight in 5 mL Luria Broth (Teknova)+50 μg/mL kanamycin, followed by inoculation into 1 L Terrific Broth media (Teknova)+50 μg/mL kanamycin. Cells are grown at 37° C. until an OD₆₀₀ of 0.6-0.8, then protein expression is induced with 0.5 mM IPTG. Cultures are then grown at 18° C. for an additional 14-18 hours. Cultures are harvested and pelleted via centrifugation, then resuspended in 1 mL extraction buffer per 5 g cell pellet (50 mM HEPES, pH 7.5, 500 mM NaCl, 5% glycerol, 0.5 mM TCEP). Cells are lysed via cell disruptor (Constant System Limited), then centrifuged at 20,000×g for 20 minutes at 4° C. in order to clarify the lysate. 0.2% polyethylenimine (PEI) is added to the clarified lysate and incubated at 4° C. with constant end-over-end rotation for 20 minutes. The lysate is then centrifuged again at 20,000×g for 10 minutes. The lysate is purified via ion exchange chromatography. After purification, fractions are run on SDS-PAGE gels, and fractions containing protein of the appropriate size are pooled and concentrated using 30 kD Amicon Ultra15 Centrifugal Units. Proteins are buffer exchanged into 12.5 mM HEPES pH 7.0, 120 mM NaCl, 0.5 mM TCEP, and 50% glycerol. Concentrations are then measured using the Nanodrop (Thermofisher), and proteins are stored at −20° C.

[0922] RNPs are prepared using a 2:1 ratio of synthetic crRNA (Integrated DNA Technologies) to protein. The RNPs are complexed for 30 minutes at 37° C. in 1× NEB2 buffer (50 mM NaCl, 10 mM Tris-HCl, 10 mM MgCl₂, 1 mM DTT, pH 7.9). After complexing, the RNPs are diluted using 1× NEB2 as a dilution buffer. Apo reactions (protein without RNA guide) are prepared in the same manner, making up the volume of crRNA with H₂O.

[0923] A target dsDNA substrate (Integrated DNA Technologies) is added at 20 nM to the RNP and apo samples. Reactions are mixed thoroughly then incubated at 37° C. for 1 hour, then quenched with 1 μL 20 mg/mL Proteinase K (Thermofisher). Reactions are incubated for another 15 minutes at 50° C., then the entire reaction is run on a 2% agarose E-gel (Thermofisher). Gels are visualized by ethidium bromide on a Gel Doc EZ Gel Imager (BioRad).

[0924] The intensities of two types of bands are measured: 1) a full-length (uncleaved) DNA band and 2) one or more downshifted cleaved DNA bands. An inactive RNP is characterized by a full-length DNA band. An active RNP yields one or more downshifted cleaved DNA bands. As the concentration of an active RNP decreases, the intensity of the full-length band increases, and the intensity of the cleaved band(s) decreases. In comparing activity of multiple RNPs, an RNP having higher activity than another is characterized by more intense cleaved bands at lower RNP concentrations.

[0925] The method of this Example allows for the comparison of in vitro cleavage activity of wild-type or variant Cas12i2 RNPs (binary complexes) on target DNA.

### Example 5—In Vitro Stability Assays of Variant Cas12i2 Polypeptides and Variant Cas12i2 Binary Complexes

[0926] In this Example, the stability of a Cas12i2 (wild-type or variant Cas12i2) RNP is assessed.

[0927] For the accelerated stability study, RNPs (5 μM) are generated in the same manner as described in Example 4, and the samples are subsequently stored at 25° C. for 48 hours.

[0928] In vitro cleavage assays (as described in Example 4) are performed on the RNP samples. These results are compared with those of Example 4 to determine the extent to which Cas12i2 RNPs (wild-type or variant Cas12i2 RNPs) stored at 25° C. for 48 hours retain biochemical activity.

[0929] Apo polypeptide (without RNA guide) is also incubated at 25° C. for 48 hours. RNA EMSA assays are performed on the apo samples using the method described in Example 3. These results are compared with those of Example 3 to determine the extent to which Cas12i2 (wild-type or variant Cas12i2) is able to form a binary complex with an RNA guide.

[0930] Apo samples incubated at 25° C. for 48 hours are also complexed with RNA guides to form RNPs, using the method described in Example 4. In vitro cleavage assays are then performed according to the methods of Example 4. The assay results are compared with those of Example 4 to assess activity levels of Cas12i2 RNPs formed with protein incubated at 25° C.

[0931] The methods of this Example allow for comparison of the stability of wild-type and variant Cas12i2 polypeptides and wild-type and variant Cas12i2 RNPs (binary complexes). A Cas12i2 polypeptide demonstrating greater specific binding to an RNA guide than another Cas12i2 polypeptide to the RNA guide is indicative of a more stable polypeptide. A Cas12i2 RNP demonstrating more robust in vitro cleavage of a target DNA than cleavage by another Cas12i2 polypeptide is indicative of a more stable binary complex.

### Example 6—Florescence Polarization Assay for Variant Cas12i2 Ternary Complex Detection

[0932] In this Example, the ability of an RNA guide, Cas12i2 polypeptide (wild-type or variant Cas12i2), and target DNA molecule to form a ternary complex is assessed through a fluorescence polarization assay.

[0933] Linear ssDNA fragments comprising the reverse complement of the T7 RNA polymerase promoter sequence upstream of the mature Cas12i2 direct repeat sequence and desired 20 bp RNA guide target are synthesized by IDT. Linear dsDNA in vitro transcription (IVT) templates are then generated by annealing a universal T7 forward oligo (95-4° C. at 5° C./minute) to the reverse complement ssDNA and filled in with Klenow fragment (New England Biolabs) for 15 minutes at 25° C. The resulting IVT template is then transcribed into an RNA guide using the HiScribe T7 High Yield RNA Synthesis Kit (New England Biolabs) at 37° C. for 4 hours. Following transcription, each RNA guide is purified using an RNA Clean and Concentrator Kit (Zymo) and stored at −20° C. until use.

[0934] To generate an RNP, a Cas12i2 polypeptide (wild-type or variant Cas12i2) and an RNA guide are combined in a 1:1.2 molar ratio for a final molar concentration of 10 μM RNP in 1× assay buffer (20 mM Tris-HCl (pH 7.5), 150 mM KCl, 5 mM MgCl₂, 1 mM DTT). The components are incubated at 37° C. for 30 minutes to allow for RNP formation.

[0935] Cas12i2 RNPs (wild-type or variant Cas12i2 RNPs) are diluted to a working concentration of 1 μM in assay buffer. A 7-point 2-fold dilution is generated from 1 μM to 15.6 nM. A Cas12i2 RNP is incubated with 6-FAM labeled DNA target (IDT) at 37° C. for 30 minutes. After incubation, fluorescence polarization values are measured using a microplate reader (Infinite 200 Pro, Tecan).

[0936] To assess ternary complex formation at different temperatures, the above protocols are repeated at a constant temperature of 25, 50, 60, and 70° C.

[0937] Binding of a Cas12i2 RNP to target DNA is characterized by changes in fluorescence polarization values. Formation of a ternary complex is observed as changing (e.g., increasing or decreasing) mP units over time and/or with increasing concentrations of Cas12i2.

[0938] This Example indicates how binding affinities of wild-type Cas12i2 RNPs to target DNAs and binding affinities of Cas12i2 variant RNPs to target DNAs can be determined and compared.

### Example 7—DNA Electrophoretic Mobility Shift Assay for Variant Cas12i2 Ternary Complex Detection

[0939] This Example describes use of a DNA EMSA to determine the ability of an RNA guide, a Cas12i2 polypeptide (wild-type or variant Cas12i2), and a target DNA substrate to form a ternary complex.

[0940] Cas12i2 vectors were transformed into E. coli BL21 (DE3) (New England BioLabs) and expressed under a T7 promoter. Transformed cells were initially grown overnight in 5 mL Luria Broth (Teknova)+50 μg/mL kanamycin, followed by inoculation into 1 L Terrific Broth media (Teknova)+50 μg/mL kanamycin. Cells were grown at 37° C. until an OD₆₀₀ of 0.6-0.8, then protein expression was induced with 0.5 mM IPTG. Cultures were then grown at 18° C. for an additional 14-18 hours. Cultures were harvested and pelleted via centrifugation, then resuspended in 1 mL extraction buffer per 5 g cell pellet (50 mM HEPES, pH 7.5, 500 mM NaCl, 5% glycerol, 0.5 mM TCEP). Cells were lysed via cell disruptor (Constant System Limited), then centrifuged at 20,000×g for 20 minutes at 4° C. in order to clarify the lysate. 0.2% polyethylenimine (PEI) was added to the clarified lysate and incubated at 4° C. with constant end-over-end rotation for 20 minutes. The lysate was then centrifuged again at 20,000×g for 10 minutes. The lysate was purified via ion exchange chromatography. After purification, fractions were run on SDS-PAGE gels, and fractions containing protein of the appropriate size were pooled and concentrated using 30 kD Amicon Ultra15 Centrifugal Units. Proteins were buffer exchanged into 12.5 mM HEPES pH 7.0, 120 mM NaCl, 0.5 mM TCEP, and 50% glycerol. Concentrations were then measured using the Nanodrop (Thermofisher) and proteins were stored at −20° C.

[0941] RNPs were prepared using a 2:1 ratio of synthetic RNA guide (Integrated DNA Technologies) to polypeptide. The RNA guide sequences are shown in Table 14. crRNA 1 (SEQ ID NO: 147) corresponded to Target 1 (SEQ ID NO: 150), crRNA 2 (SEQ ID NO: 148) corresponded to Target 2 (SEQ ID NO: 151), and crRNA 3 (SEQ ID NO: 149) corresponded to Target 3 (SEQ ID NO: 152). The RNPs were complexed for 30 minutes at 37° C. in 1× NEB2 buffer (50 mM NaCl, 10 mM Tris-HCl, 10 mM MgCl₂, 1 mM DTT, pH 7.9). After complexing, a 5 point 1:2 serial dilution from 5 μM to 37.5 μM was performed, using 1× NEB2 as a dilution buffer. Apo reactions (polypeptide without RNA guide) were prepared in the same manner, making up the volume of RNA guide with H₂O.

TABLE 14
DNA EMSA RNA guide sequences.

| RNA Guide | Sequence |
|---|---|
| crRNA 1 | AGAAATCCGTCTTTCATTGACGGGGTGAGGGAGGAGA |
| (AAVS1) | GATGCC (SEQ ID NO: 147) |
| crRNA 2 | AGAAATCCGTCTTTCATTGACGGTGTGCCCGTGGGGA |
| (VEGFA) | CCCCCG (SEQ ID NO: 148) |
| crRNA 3 | AGAAATCCGTCTTTCATTGACGGTGGATAAAACTTCT |
| (EMX1) | CGGAGG (SEQ ID NO: 149) |

[0942] dsDNA target substrates of the sequences in Table 15 were generated by PCR from an oligo (Integrated DNA Technologies) using the primers in Table 16. Before PCR, the 5′ end of the forward primer was labeled an IR800 dye, as described in Yan et al., 2018. Using Amplitaq Gold (Thermofisher), the dsDNA substrate was then amplified with the IR800 labeled forward primer and unlabeled reverse primer. The resulting dsDNA was purified with a DNA Clean and Concentrator Kit (Zymo) and quantified by Nanodrop (Thermofisher).

TABLE 15
DNA EMSA Target Substrates.

| Target | |
|---|---|
| Substrate | Sequence |
| Target 1 | TTTCTGTCTGCAGCTTGTGGCCTGGGTCACCTCTACGGCTGGCCCAGATCCTT |
| (AAVS1) | CCCTGCCGCCTCCTTCAGGTTCCGTCTTCCTCCACTCCCTCTTCCCCTTGCTC |
| | TCTGCTGTGTTGCTGCCCAAGGATGCTCTTTCCGGAGCACTTCCTTCTCGGCG |
| | CTGCACCACGTGATGTCCTCTGAGCGGATCCTCCCCGTGTCTGGGTCCTCTCC |
| | GGGCATCTCTCCTCCCTCACCCAACCCCATGCCGTCTTCACTCGCTGGGTTCC |
| | CTTTTCCTTCTCCTTCTGGGGCCTGTGCCATCTCTCGTTTCTTAGGATGGCCT |
| | TCTCCGACGGATGTCTCCCTTGCGTCCCGCCTCCCCTTCTTGTAGGCCTGCAT |
| | CATCACCGTTTTTCTGGACAACCCCAAAGTACCCCGTCTCCCTGGCTTTAGCC |
| | ACCTCTCCATCCTCTTGCTTTCTTTGCCTGGACACCCCGTTCTCCTGTGGATT |
| | CGGGTCACCTCTCACTCCTTTCATTTGGGCAGCTCCCCTACCCCCCTTACCTC |
| | TCTAGTCTGTGCTAGCTCTTCCAGCCCCCTGTCATGGCATCTTCCAGGGGTCC |
| | GAGAGCTCAGCTAGTCTTCTTCCTCCAACCCGGGCCCCTATGTCCACTTCAGG |
| | ACAGCATGTTTG (SEQ ID NO: 150) |
| Target 2 | GACCTTAATACTTACCATGGCTTTGGACCAGGGAACTAGGGGGATAGTGAGAG |
| (VEGFA) | CAGGGAGAGGGAAGTGTGGGGAAGGTACAGGGGACCTCGACAGTGAAGCATTC |
| | TGGGGTTTTCCTCCTGCATTTCGAGCTCCCCAGCCCCCAACATCTGGTTAGTC |
| | TTTAACTTCCTCGGGTTCATAACCATAGCAGTCCAGGAGTGGTGGGCATATTC |
| | TGTGCCCGTGGGGACCCCCGGTTGTGTCCTGTTCGACTCAGAAGACTTGGAGA |
| | AGCCAGAGGCTGTTGGTGGGAGGGAAGTGAGGAGGGAGGAGGGGCTGGGTGGC |
| | TGGGCCTGTGCACCCCAGCCCCTGCCCATGCCCATGCCTTGCTCTCTTTCTGT |
| | CCTCAGTGGTCCCAGGCTGCACCCATGGCAGAAGGAGGAGGGCAGAATCATCA |
| | CGAAGGTGAGTCCCCCTGGCTGTTGGATGGGGTTCCCTGTCCTCTCAGGGGAT |
| | GGGTGGATGGCCTAATTCCTTTTTCTTCAGAACTGTGGGGAGGAAG (SEQ ID |
| | NO: 151) |
| Target 3 | AACAGGCCTGAGCATCTTAGCTCTGGGAGGCAGAGGCCAAGCCTGTCTGTTTC |
| (EMX1) | TTACAGGACCCAGCTCAGTGCCCGGGATGGAGTACATGCTCAATAAACATGTA |
| | TTGAATTAATGAGCACATTTCTCTTTGCCCATACAAATACACACTAACTTTAT |
| | CAGTCATTCCCCTTGCTCTCTGCTGTCATTGCTCCCTCCCTGTCCCTCTCCTT |
| | CTATCTTTCCCTTGTACTTTCACAGCTGATTGTTGATTTAGATTATGCATATA |
| | CCAGTTTGTGGATAAAACTTCTCGGAGGGTTACTCAGATCAGTGTGTGAATGA |
| | GCTCTTAATCCAGATCTCAGAAGTCTGTGCACTCCCCAAGCTTTAGCCGGGTG |
| | CTAGGAGGIGGGCAACCTGGGTGACTCTGTGTGTTTAGTGGGAGTGGGGTATT |
| | CGTGCTGGGATGGCCAGTGCCTCAATCTAGGAGATGAGGGAAGAGCCCTGGGC |
| | AAGGGCTAGTTCTCCCTTCAGGTTCTAATGACTTGTTCCTCACTGCTTGGGTG |
| | CCGCCCTGGAGTATGACCAGGAAGGTACCAGTCTAAGCTTCAGTCCTG (SEQ |
| | ID NO: 152) |

| | Forward Primer | Reverse Primer |
|---|---|---|
| Target Substrate | Sequence | Sequence |
| Target 1 (AAVS1) | TTTCTGTCTGCAGCTT | GCAAACATGCTGTCCT |
| (SEQ ID NO: 150) | GTGGCCTGG | GAAGTGGACATAGGG |
| | (SEQ ID NO: 153) | (SEQ ID NO: 154) |
| Target 2 (VEGFA) | GACCTTAATACTTACC | CTTCCTCCCCACAGTT |
| (SEQ ID NO: 151) | ATGGCTTTGGACCAGGG | CTGAAGAAAAAGG |
| | (SEQ ID NO: 155) | (SEQ ID NO: 156) |
| Target 3 (EMX1) | AACAGGCCTGAGCATC | CAGGACTGAAGCTTAG |
| (SEQ ID NO: 152) | TTAGCTCTGG | ACTGGTACCTTCC |
| | (SEQ ID NO: 157) | (SEQ ID NO: 158) |

[0943] RNP samples and Apo (control) samples were diluted 1:10 into 1× binding buffer (50 mM NaCl, 10 mM Tris-HCl, 1 mM TCEP, 10% glycerol, 2 mM EDTA, pH 8.0) plus 20 nM IR800 labeled target DNA substrate and mixed thoroughly. Reactions were incubated at 37° C. for 1 hour. Bromophenol blue was added to the reactions for dye front visualization, then the entire reaction was loaded onto a 6% DNA Retardation Gel (Thermofisher), which ran for 90 minutes at 80V. The gel was imaged on the Licor Odyssey CLx.

[0944] FIG. 3A, FIG. 31B, and FIG. 3C show EMSA gels for Target 1 (AAVS1), Target 2 (VEGFA), and Target 3 (EMX1), respectively. In each gel, the “Apo” lanes (lanes 1, 9, and 15) included target DNA plus wild-type Cas12i2 (lane 1), Cas12i2 variant of SEQ ID NO:3 (lane 9), or Cas12i2 variant of SEQ ID NO: 4 (lane 15). The “Ref” lanes included target DNA alone (SEQ ID NO: 150, SEQ ID NO: 151, or SEQ ID NO: 152). Lanes 2-6 in FIG. 3A, FIG. 31B, and FIG. 3C corresponded to decreasing concentrations of RNPs comprising wild-type Cas12i2 (SEQ ID NO: 2), from 1 μM to 37 nM. Lanes 9-13 in FIG. 3A, FIG. 31B, and FIG. 3C corresponded to decreasing concentrations of RNPs comprising the Cas12i2 variant of SEQ ID NO: 3, from 1 μM to 37 nM. Lanes 16-20 in FIG. 3A, FIG. 31B, and FIG. 3C corresponded to decreasing concentrations of RNPs comprising the Cas12i2 variant of SEQ ID NO: 4, from 1 μM to 37 nM.

[0945] The gels of FIG. 3A, FIG. 31B, and FIG. 3C show bands of DNA that migrated different distances. In this assay, the rate at which DNA migrates through the gel is determined by its size. A DNA only sample is able to migrate a particular distance. However, if an RNP binds to the DNA, a band that represents a larger, less mobile DNA complex appears, which is “upshifted” on the gel. Therefore, the arrows in FIG. 3A, FIG. 3B, and FIG. 3C point to “unbound dsDNA” and the “bound dsDNA,” wherein the “bound dsDNA” migrated less than the “unbound dsDNA.”

[0946] FIG. 3A shows that for the highest concentration of wild-type Cas12i2 RNP (lane 2), a faint bound dsDNA band was observed, indicating that a small amount of wild-type Cas12i2 RNP bound to the AAVS1 target DNA. However, the bound dsDNA bands were more intense with variant Cas12i2 (SEQ ID NO: 3 and SEQ ID NO: 4) RNPs. Additionally, bound dsDNA bands appeared across multiple concentrations of RNPs prepared with variant Cas12i2 polypeptides (variant Cas12i2 of SEQ ID NO: 3 in lanes 9-11 of FIG. 3A and variant Cas12i2 of SEQ ID NO: 4 in lanes 16-20 of FIG. 3A). This indicated that RNPs prepared with variant Cas12i2 polypeptides of SEQ ID NO: 3 and SEQ ID NO: 4 had a higher affinity for AAVS1 target DNA.

[0947] FIG. 3B shows that even at the highest concentrations of wild-type Cas12i2 RNP (lane 2), only unbound dsDNA bands were present, indicating that wild-type Cas12i2 RNPs did not form a ternary complex with VEGFA target DNA. However, bound dsDNA bands were observed with RNPs prepared with variant Cas12i2 polypeptides (variant Cas12i2 of SEQ ID NO: 3 in lanes 9-11 of FIG. 3B and variant Cas12i2 of SEQ ID NO: 4 in lanes 16-20 of FIG. 3B). Therefore, RNPs prepared with variant Cas12i2 polypeptides of SEQ ID NO: 3 and SEQ ID NO: 4 had a higher affinity for VEGFA target DNA than wild-type Cas12i2.

[0948] Likewise, FIG. 3C shows that at even the highest concentrations of wild-type Cas12i2 RNP (lane 2), only unbound dsDNA bands were present, indicating that wild-type Cas12i2 RNPs did not form a ternary complex with EMX1 target DNA. However, bound dsDNA bands were observed with RNPs prepared with variant Cas12i2 polypeptides (variant Cas12i2 of SEQ ID NO: 3 in lanes 9-12 of FIG. 3C and variant Cas12i2 of SEQ ID NO: 4 in lanes 16-20). Therefore, RNPs prepared with variant Cas12i2 polypeptides of SEQ ID NO: 3 and SEQ ID NO: 4 had a higher affinity for EMX1 target DNA than wild-type Cas12i2.

[0949] Based upon the data in FIG. 3A, FIG. 3B, and FIG. 3C, RNPs prepared with variant Cas12i2 polypeptides of SEQ ID NO: 3 and SEQ ID NO: 4 had a higher affinity for multiple dsDNA targets, compared to the affinity of wild-type Cas12i2 RNPs for dsDNA targets.

[0950] In order to show that upshifting of substrate DNA was sequence dependent, RNPs were incubated with mis-matching target substrates. These reactions were carried out in the same manner, making up any volumes of polypeptide with 1× NEB2 buffer. Reactions comprising Cas12i2 polypeptide (wild-type or variant), crRNA 1 (SEQ ID NO: 147), and DNA Target 3 (SEQ ID NO: 152) are shown in FIG. 3D.

[0951] In the gel in FIG. 3D, the “Apo” lanes (lanes 1, 9, and 15) included Target 3 DNA (SEQ ID NO: 152) plus wild-type Cas12i2 (lane 1), variant Cas12i2 of SEQ ID NO: 3 (lane 9), or variant Cas12i2 of SEQ ID NO: 4 (lane 15). The “Ref” lanes included Target 3 DNA alone. Lanes 2-6 in FIG. 3D corresponded to decreasing concentrations of wild-type Cas12i2 RNPs prepared with crRNA 1 (SEQ ID NO: 147), from 1 μM to 37 nM. Lanes 9-13 in FIG. 3D corresponded to decreasing concentrations of RNPs prepared with variant Cas12i2 of SEQ ID NO: 3 and crRNA 1 (SEQ ID NO: 147), from 1 UM to 37 nM. Lanes 16-20 in FIG. 3D corresponded to decreasing concentrations of RNPs prepared with variant Cas12i2 of SEQ ID NO: 4 and crRNA 1 (SEQ ID NO: 147), from 1 μM to 37 nM.

[0952] As shown in FIG. 3D, only one weakly bound dsDNA complex was observed at the highest concentration of variant Cas12i2 of SEQ ID NO: 4. All other dsDNAs remained unbound by RNP, indicating that the majority of the RNPs were unable to form a ternary complex. Therefore, the ability of an RNP to bind to a target DNA substrate, as shown in FIG. 3A, FIG. 3B, and FIG. 3C, was dependent upon the sequences of the RNA guide and the target DNA substrate.

[0953] Furthermore, in order to show that upshifting of substrate DNA was not due to base pairing of the DNA target and RNA guide, reactions comprising only RNA guide and its corresponding target DNA were analyzed. No upshifts were observed (FIG. 3E). As shown in FIG. 3E, a sample comprising crRNA 1 (SEQ ID NO: 147) and Target 1 substrate DNA (SEQ ID NO: 150) (lane 1) migrated the same distance as Target 1 substrate DNA (lane 5). A sample comprising crRNA 2 (SEQ ID NO: 148) and Target 2 substrate DNA (SEQ ID NO: 151) (lane 2) migrated the same distance as Target 2 substrate DNA (lane 6). A sample comprising crRNA 3 (SEQ ID NO: 149) and Target 3 substrate DNA (SEQ ID NO: 152) (lane 3) migrated the same distance as Target 3 substrate DNA (lane 7). Similarly, a sample comprising crRNA 1 (SEQ ID NO: 147) and Target 3 substrate DNA (SEQ ID NO: 152) (lane 4) migrated the same distance as Target 3 substrate DNA (lane 7). Therefore, the bound dsDNA bands observed in FIG. 3A, FIG. 3B, and FIG. 3C were due to RNP binding to the target DNA rather than due to base pairing between the RNA guide and target DNA substrate.

[0954] Overall, this Example shows that RNPs (binary complexes) prepared with variant Cas12i2 polypeptides had higher affinity to multiple DNA targets (to produce a ternary complex) than the affinity of wild-type Cas12i2 RNPs to the DNA targets.

### Example 8—In Vitro Cleavage Assay for Determination of Variant Cas12i2 Ternary Complex Formation

[0955] This Example describes methods for assessing in vitro biochemical activity of Cas12i2 (wild-type or variant Cas12i2) RNPs on a target DNA substrate as a means for determining ternary complex formation.

[0956] The RNA guides and dsDNA substrates in this Example are identical to those in Table 14 and Table 15, respectively. dsDNA substrates in this assay remain unlabeled. RNP and apo samples are generated and incubated in the same manner as described in Example 7, then serially diluted from 5 μM to 37.5 nM in 1× NEB2. RNP and apo samples are then further diluted 1:10 into 1× NEB2, and a target dsDNA substrate is added at 20 nM. Reactions are mixed thoroughly then incubated at 37° C. for 1 hour, then quenched with 1 μL 20 mg/mL Proteinase K (Thermofisher). Reactions are incubated for another 15 minutes at 50° C., then the entire reaction is run on a 2% agarose E-gel (Thermofisher). Gels are visualized by ethidium bromide on a Gel Doc EZ Gel Imager (BioRad).

[0957] The intensities of two types of bands are measured: 1) a full-length (uncleaved) DNA band and 2) one or more downshifted cleaved DNA bands. An inactive RNP is characterized by a full-length DNA band (e.g., the RNP was unable to form a ternary complex with the DNA substrate). An active RNP yields one or more downshifted cleaved DNA bands (e.g., the RNP was able to form a ternary complex with the DNA substrate). As the concentration of an active RNP decreases, the intensity of the full-length band increases, and the intensity of the cleaved band(s) decreases. In comparing activity of multiple RNPs, an RNP having higher activity than another is characterized by more intense cleaved bands at lower RNP concentrations.

[0958] The method of this Example allows for the comparison of in vitro cleavage activity of wild-type or variant Cas12i2 RNPs (binary complexes) on target DNA. Cleavage activity is indicative of an RNP (binary complex) forming a ternary complex with target DNA.

### Example 9—In Vitro Stability Assays for Variant Cas12i2 Binary and Ternary Complexes

[0959] In this Example, the stability of a Cas12i2 (wild-type or variant Cas12i2) RNP is assessed, wherein a sTable 8as12i2 RNP (binary complex) is able to form a ternary complex with a target DNA substrate.

[0960] For the accelerated stability study, RNPs (5 μM) are generated in the same manner as described in Example 7, and the samples are subsequently stored at 25° C. for 48 hours.

[0961] DNA EMSA assays (as described in Example 7) and in vitro cleavage assays (as described in Example 8) are performed on the RNP samples. These results are compared with those of Example 7 and Example 8 to determine the extent to which Cas12i2 RNPs (wild-type or variant Cas12i2 RNPs) stored at 25° C. for 48 hours retain DNA binding and cleavage activity. DNA binding is indicative of formation of a ternary complex, and cleavage activity is indicative of an active ternary complex.

[0962] Apo polypeptide (without RNA guide) is also incubated at 25° C. for 48 hours. The apo samples are then complexed with RNA guides to form RNPs, using the method described in Example 7. DNA EMSAs and in vitro cleavage assays are then performed, according to the methods of Example 7 and Example 8, respectively. The DNA EMSA results are compared with those of Example 7 to determine the extent to which Cas12i2 RNPs (formed after incubation of pre-complexed Cas12i2 polypeptides at 25° C.) are able to form a ternary complex with target DNA. Further, the in vitro cleavage assay results are compared with those of Example 8 to determine the extent to which Cas12i2 RNPs (formed after incubation of pre-complexed Cas12i2 polypeptides at 25° C.) are active (e.g., form a functional ternary complex with target DNA.)

[0963] The methods of this Example allow for comparison of the stability of wild-type and variant Cas12i2 polypeptides and wild-type and variant Cas12i2 RNPs (binary complexes). In this Example, a Cas12i2 RNP that retains in vitro cleavage activity on a target DNA is indicative of a more stable binary complex that is able to form a ternary complex, as compared to a Cas12i2 RNP demonstrating decreased in vitro cleavage activity on a target DNA.

### Example 10-In Vitro Targeting of GFP by Cas12i2 Variants

[0964] This Example describes use of a fluorescence depletion assay (FDA) to measure activity of wild-type Cas12i2 and Cas12i2 variants.

[0965] In this assay, an active CRISPR system designed to target GFP binds and cleaves the double-stranded DNA region encoding GFP, resulting in depletion of GFP fluorescence. The FDA assay involves in vitro transcription and translation, allowing production of an RNP from a DNA template encoding a Cas12i2 polypeptide and a DNA template containing a pre-crRNA sequence under a T7 promoter with direct repeat (DR)-spacer-direct repeat (DR); the spacer targeted GFP. In the same one-pot reaction, GFP and RFP were also produced as both the target and the fluorescence reporter (FIG. 4). The target GFP plasmid sequence is set forth in SEQ ID NO: 159, and the fluorescence reporter RFP plasmid sequence is set forth in SEQ ID NO: 160. GFP and RFP fluorescence values were measured every 20 min at 37° C. for 12 hr, using a TECAN Infinite F Plex plate reader. Since RFP was not targeted, its fluorescence was not affected and was therefore used as an internal signal control.

[0966] A total of 20 GFP targets (plus 1 non-target) were designed for screening the activities of wild-type Cas12i2 and Cas12i2 variants. Pre-crRNA sequences, target sequences, and non-target control sequences used for the FDA assay are listed in Table 17.

TABLE 17
pre-CRNA and Target Sequences for FDA Assay.

| Target | pre-crRNA Sequence | Target Sequence |
|---|---|---|
| top01 | gaaattaatacgactcactatagGTTGCAAAACCCAAG | TAAAGGTTGTTTTACGACAG |
| | AAATCCGTCTTTCATTGACGGTAAAGGTTGTTTTACGA | ACGATAACAGG (SEQ ID |
| | CAGACGATAACAGGGTTGCAAAACCCAAGAAATCCGTC | NO: 162) |
| | TTTCATTGACGGctaacccctctctaaacggaggggtt | |
| | t (SEQ ID NO: 161) | |
| top02 | gaaattaatacgactcactatagGTTGCAAAACCCAAG | AGTGTTTCGCCAAGTACCCG |
| | AAATCCGTCTTTCATTGACGGAGTGTTTCGCCAAGTAC | AGCCACATCAA (SEQ ID |
| | CCGAGCCACATCAAGTTGCAAAACCCAAGAAATCCGTC | NO: 164) |
| | TTTCATTGACGGctaacccctctctaaacggaggggtt | |
| | t (SEQ ID NO: 163) | |
| top03 | gaaattaatacgactcactatagGTTGCAAAACCCAAG | GCCAAGTACCCGAGCCACAT |
| | AAATCCGTCTTTCATTGACGGGCCAAGTACCCGAGCCA | CAAGGATTTCT (SEQ ID |
| | CATCAAGGATTTCTGTTGCAAAACCCAAGAAATCCGTC | NO: 166) |
| | TTTCATTGACGGctaacccctctctaaacggaggggtt | |
| | t (SEQ ID NO: 165) | |
| top04 | gaaattaatacgactcactatagGTTGCAAAACCCAAG | TTTAAGAGCGCCATGCCGGA |
| | AAATCCGTCTTTCATTGACGGTTTAAGAGCGCCATGCC | AGGTTATACCC (SEQ ID |
| | GGAAGGTTATACCCGTTGCAAAACCCAAGAAATCCGTC | NO: 168) |
| | TTTCATTGACGGctaacccctctctaaacggaggggtt | |
| | t (SEQ ID NO: 167) | |
| top05 | gaaattaatacgactcactatagGTTGCAAAACCCAAG | GAAGGCGACGGCGTGTACAA |
| | AAATCCGTCTTTCATTGACGGGAAGGCGACGGCGTGTA | GACGCGTGCTA (SEQ ID |
| | CAAGACGCGTGCTAGTTGCAAAACCCAAGAAATCCGTC | NO: 170) |
| | TTTCATTGACGGctaacccctctctaaacggaggggtt | |
| | t (SEQ ID NO: 169) | |
| top06 | gaaattaatacgactcactatagGTTGCAAAACCCAAG | TATCTACAATCGTGTCACGC |
| | AAATCCGTCTTTCATTGACGGTATCTACAATCGTGTCA | TGACTGGTGAG (SEQ ID |
| | CGCTGACTGGTGAGGTTGCAAAACCCAAGAAATCCGTC | NO: 172) |
| | TTTCATTGACGGctaacccctctctaaacggaggggtt | |
| | t (SEQ ID NO: 171) | |
| top07 | gaaattaatacgactcactatagGTTGCAAAACCCAAG | TGCGTAAGAACGTTGCATTC |
| | AAATCCGTCTTTCATTGACGGTGCGTAAGAACGTTGCA | CAATGCCCGCC (SEQ ID |
| | TTCCAATGCCCGCCGTTGCAAAACCCAAGAAATCCGTC | NO: 174) |
| | TTTCATTGACGGctaacccctctctaaacggaggggtt | |
| | t (SEQ ID NO: 173) | |
| top08 | gaaattaatacgactcactatagGTTGCAAAACCCAAG | CAATGCCCGCCAAGCATTCT |
| | AAATCCGTCTTTCATTGACGGCAATGCCCGCCAAGCAT | GTATATTCTGC (SEQ ID |
| | TCTGTATATTCTGCGTTGCAAAACCCAAGAAATCCGTC | NO: 176) |
| | TTTCATTGACGGctaacccctctctaaacggaggggtt | |
| | t (SEQ ID NO: 175) | |
| top09 | gaaattaatacgactcactatagGTTGCAAAACCCAAG | TGCCTGACACCGTTAACAAT |
| | AAATCCGTCTTTCATTGACGGTGCCTGACACCGTTAAC | GGCATCCGCGT (SEQ ID |
| | AATGGCATCCGCGTGTTGCAAAACCCAAGAAATCCGTC | NO: 178) |
| | TTTCATTGACGGctaacccctctctaaacggaggggtt | |
| | t (SEQ ID NO: 177) | |
| top10 | gaaattaatacgactcactatagGTTGCAAAACCCAAG | AACCAGGCGTACGATATTGA |
| | AAATCCGTCTTTCATTGACGGAACCAGGCGTACGATAT | AGGTGTGACCG (SEQ ID |
| | TGAAGGTGTGACCGGTTGCAAAACCCAAGAAATCCGTC | NO: 180) |
| | TTTCATTGACGGctaacccctctctaaacggaggggtt | |
| | t (SEQ ID NO: 179) | |
| bot01 | gaaattaatacgactcactatagGTTGCAAAACCCAAG | AACCCTGTTATCGTCTGTCG |
| | AAATCCGTCTTTCATTGACGGAACCCTGTTATCGTCTG | TAAAACAACCT (SEQ ID |
| | TCGTAAAACAACCTGTTGCAAAACCCAAGAAATCCGTC | NO: 182) |
| | TTTCATTGACGGctaacccctctctaaacggaggggtt | |
| | t (SEQ ID NO: 181) | |
| bot02 | gaaattaatacgactcactatagGTTGCAAAACCCAAG | TCAAACAGTTTTGCACCTTC |
| | AAATCCGTCTTTCATTGACGGTCAAACAGTTTTGCACC | CGTCAATGCCG (SEQ ID |
| | TTCCGTCAATGCCGGTTGCAAAACCCAAGAAATCCGTC | NO: 184) |
| | TTTCATTGACGGctaacccctctctaaacggaggggtt | |
| | t (SEQ ID NO: 183) | |
| bot03 | gaaattaatacgactcactatagGTTGCAAAACCCAAG | ATACCTTCGACGTCGCCTTC |
| | AAATCCGTCTTTCATTGACGGATACCTTCGACGTCGCC | CAGTTCGGTGA (SEQ ID |
| | TTCCAGTTCGGTGAGTTGCAAAACCCAAGAAATCCGTC | NO: 186) |
| | TTTCATTGACGGctaacccctctctaaacggaggggtt | |
| | t (SEQ ID NO: 185) | |
| bot04 | gaaattaatacgactcactatagGTTGCAAAACCCAAG | GCTTTAATGGTACCCGTGGT |
| | AAATCCGTCTTTCATTGACGGGCTTTAATGGTACCCGT | CGCGTCACCGG (SEQ ID |
| | GGTCGCGTCACCGGGTTGCAAAACCCAAGAAATCCGTC | NO: 188) |
| | TTTCATTGACGGctaacccctctctaaacggaggggtt | |
| | t (SEQ ID NO: 187) | |
| bot05 | gaaattaatacgactcactatagGTTGCAAAACCCAAG | GAAGCTGATGGTACGCTCTT |
| | AAATCCGTCTTTCATTGACGGGAAGCTGATGGTACGCT | GGGTATAACCT (SEQ ID |
| | CTTGGGTATAACCTGTTGCAAAACCCAAGAAATCCGTC | NO: 190) |
| | TTTCATTGACGGctaacccctctctaaacggaggggtt | |
| | t (SEQ ID NO: 189) | |
| bot06 | gaaattaatacgactcactatagGTTGCAAAACCCAAG | GTAGGTAACCATAGCACGCG |
| | AAATCCGTCTTTCATTGACGGGTAGGTAACCATAGCAC | TCTTGTACACG (SEQ ID |
| | GCGTCTTGTACACGGTTGCAAAACCCAAGAAATCCGTC | NO: 192) |
| | TTTCATTGACGGctaacccctctctaaacggaggggtt | |
| | t (SEQ ID NO: 191) | |
| bot07 | gaaattaatacgactcactatagGTTGCAAAACCCAAG | TCACCAGTCAGCGTGACACG |
| | AAATCCGTCTTTCATTGACGGTCACCAGTCAGCGTGAC | ATTGTAGATAG (SEQ ID |
| | ACGATTGTAGATAGGTTGCAAAACCCAAGAAATCCGTC | NO: 194) |
| | TTTCATTGACGGctaacccctctctaaacggaggggtt | |
| | t (SEQ ID NO: 193) | |
| bot08 | gaaattaatacgactcactatagGTTGCAAAACCCAAG | TTAAAGTTCTCACCAGTCAG |
| | AAATCCGTCTTTCATTGACGGTTAAAGTTCTCACCAGT | CGTGACACGAT (SEQ ID |
| | CAGCGTGACACGATGTTGCAAAACCCAAGAAATCCGTC | NO: 196) |
| | TTTCATTGACGGctaacccctctctaaacggaggggtt | |
| | t (SEQ ID NO: 195) | |
| bot09 | gaaattaatacgactcactatagGTTGCAAAACCCAAG | TTACGCAGAATGTGACCGTC |
| | AAATCCGTCTTTCATTGACGGTTACGCAGAATGTGACC | TTTCTTAAAGT (SEQ ID |
| | GTCTTTCTTAAAGTGTTGCAAAACCCAAGAAATCCGTC | NO: 198) |
| | TTTCATTGACGGctaacccctctctaaacggaggggtt | |
| | t (SEQ ID NO: 197) | |
| bot010 | gaaattaatacgactcactatagGTTGCAAAACCCAAG | GGTCACACCTTCAATATCGT |
| | AAATCCGTCTTTCATTGACGGGGTCACACCTTCAATAT | ACGCCTGGTTG (SEQ ID |
| | CGTACGCCTGGTTGGTTGCAAAACCCAAGAAATCCGTC | NO: 200) |
| | TTTCATTGACGGctaacccctctctaaacggaggggtt | |
| | t (SEQ ID NO: 199) | |
| non- | gaaattaatacgactcactatagGTTGCAAAACCCAAG | |
| target_ | AAATCCGTCTTTCATTGACGGGTGATTGCGCCTGAGCG | |
| top12 | AGACGAAATACGCGGTTGCAAAACCCAAGAAATCCGTC | |
| | TTTCATTGACGGctaacccctctctaaacggaggggtt | |
| | t (SEQ ID NO: 201) | |

[0967] GFP signal was normalized to RFP signal, then the average fluorescence of three technical replicates was taken at each time point. GFP fluorescence depletion was then calculated by dividing the GFP signal of an effector incubated with a non-GFP targeting pre-crRNA (which instead targets a kanamycin resistance gene) by the GFP signal of an effector incubated with a GFP targeting pre-crRNA. The resulting value is referred to as “Depletion Ratio (Non-target/target)” in FIGS. 5A-T.

[0968] A Depletion Ratio (Non-target/target) of one or approximately one indicated that there was little to no difference in GFP depletion with respect to a non-GFP targeting pre-crRNA and a GFP targeting pre-crRNA (e.g., 10 RFU/10 RFU=1). A Depletion Ratio (Non-target/target) of greater than one indicated that there was a difference in GFP depletion with respect to a non-GFP targeting pre-crRNA and a GFP targeting pre-crRNA (e.g., 10 RFU/5 RFU=2). Depletion of the GFP signal indicated that the effector formed a functional RNP and interfered with the production of GFP by introducing double-stranded DNA cleavage within the GFP coding region. The extent of the GFP depletion was largely correlated to the specific activity of a Cas12i2 CRISPR system (wild-type Cas12i2 or variant Cas12i2 system).

[0969] FIGS. 5A-T show graphs of Depletion Ratios (Non-target/target) for RNPs formed by wild-type Cas12i2 (SEQ ID NO: 2), variant Cas12i2 of SEQ ID NO: 3, and variant Cas12i2 of SEQ ID NO: 4 measured every 20 minutes for each of the 20 GFP targets (top1, top2, top3, top4, top5, top6, top7, top8, top9, top10, bot1, bot2, bot3, bot4, bot5, bot6, bot7, bot8, bot9, bot10.) Wild-type Cas12i2 is depicted with a solid line, variant Cas12i2 of SEQ ID NO: 3 is depicted by a dotted line, and variant Cas12i2 of SEQ ID NO: 4 is depicted by a dashed line.

[0970] At each target, the Depletion Ratios for RNPs formed with variant Cas12i2 of SEQ ID NO: 3 or variant Cas12i2 of SEQ ID NO: 4 were greater than the Depletion Ratios for RNPs formed with wild-type Cas12i2. This indicated that the specific activity of the Cas12i2 variants was higher than the specific activity of wild-type Cas12i2 at each target site.

[0971] Furthermore, at several targets (e.g., top01, top05, top09, top10, bot02, bot03, bot04, bot09, bot10), the Depletion Ratios for wild-type Cas12i2 were one or about one, indicating that wild-type Cas12i2 was not active at these target sites (i.e., any measured GFP depletion induced by a non-GFP targeting pre-crRNA was essentially equal to GFP depletion induced by a GFP targeting pre-crRNA). See FIG. 5A, FIG. 5D, FIG. 5I, FIG. 5J, FIG. 5L, FIG. 5M, FIG. 5N, FIG. 5S, and FIG. 5T. However, at each of these targets, the Depletion Ratios for RNPs formed with variant Cas12i2 of SEQ ID NO: 3 or variant Cas12i2 of SEQ ID NO: 4 were greater than one, indicating that the Cas12i2 variants were active in depleting the GFP signal at each of sites. Therefore, the Cas12i2 variants were able to target sites on GFP that were not able to be targeted by wild-type Cas12i2.

[0972] This Example shows that Cas12i2 variant binary complexes demonstrated increased ternary complex formation with GFP target sites, as compared to wild-type Cas12i2 binary complexes. This Example further shows that the Cas12i2 variants expanded the targeting space by cleaving double-stranded DNA at GFP target sites unable to be cleaved by wild-type Cas12i2. Furthermore, Cas12i2 variants more efficiently cleaved double-stranded DNA at multiple GFP target sites, compared to wild-type Cas12i2.

### Example 11—Targeting of Mammalian Genes by Cas12i2 Variants

[0973] This Example describes indel assessment on multiple targets using wild-type Cas12i2 and Cas12i2 variants introduced into mammalian cells by transient transfection.

[0974] Wild-type Cas12i2, variant Cas12i2 of SEQ ID NO: 3, and variant Cas12i2 of SEQ ID NO: 4 were cloned into a pcda3.1 backbone (Invitrogen). The plasmids were then maxi-prepped and diluted to 1 μg/μL. For RNA guide preparation, a dsDNA fragment encoding a crRNA was derived by ultramers containing the target sequence scaffold, and the U6 promoter. Ultramers were resuspended in 10 mM Tris·HCl at a pH of 7.5 to a final stock concentration of 100 μM. Working stocks were subsequently diluted to 10 μM, again using 10 mM Tris·HCl to serve as the template for the PCR reaction. The amplification of the crRNA was done in 50 μL reactions with the following components: 0.02 μl of aforementioned template, 2.5 μl forward primer, 2.5 μl reverse primer, 25 μL NEB HiFi Polymerase, and 20 μl water. Cycling conditions were: 1×(30s at 98° C.), 30×(10s at 98° C., 15s at 67° C.), 1×(2 min at 72° C.). PCR products were cleaned up with a 1.8× SPRI treatment and normalized to 25 ng/μL. The prepared crRNA sequences and their corresponding target sequences are shown in Table 18.

TABLE 18
crRNA and Target Sequences for Transient Transfection.

| Target | crRNA sequence | Target Sequence |
|---|---|---|
| 1 (AAVS1) | AGAAATCCGTCTTTCATTGACGGTGTCCCCCCAAGT | TGTCCCCCCAAGTTTTGGA |
| | TTTGGAC | C |
| | (SEQ ID NO: 202) | (SEQ ID NO: 203) |
| 2 (AAVS1) | AGAAATCCGTCTTTCATTGACGGGGAGAGGTGAGGG | GGAGAGGTGAGGGACTTGG |
| | ACTTGGG | G |
| | (SEQ ID NO: 204) | (SEQ ID NO: 205) |
| 3 (AAVS) | AGAAATCCGTCTTTCATTGACGGGTGAGAATGGTGC | GTGAGAATGGTGCGTCCTA |
| | GTCCTAG | G |
| | (SEQ ID NO: 206) | (SEQ ID NO: 207) |
| 4 (AAVS1) | AGAAATCCGTCTTTCATTGACGGGGGGTTGTCCAGA | GGGGTTGTCCAGAAAAACG |
| | AAAACGG | G |
| | (SEQ ID NO: 208) | (SEQ ID NO: 209) |
| 5 (AAVS1) | AGAAATCCGTCTTTCATTGACGGAACTGGCCCTGGC | AACTGGCCCTGGCTTTGGC |
| | TTTGGCA | A |
| | (SEQ ID NO: 210) | (SEQ ID NO: 211) |
| 6 (EMX1) | AGAAATCCGTCTTTCATTGACGGGGGCGCAGGGCCA | GGGCGCAGGGCCACCTGGA |
| | CCTGGAC | C |
| | (SEQ ID NO: 212) | (SEQ ID NO: 213) |
| 7 (EMX1) | AGAAATCCGTCTTTCATTGACGGGGATGGCGACTTC | GGATGGCGACTTCAGGCAC |
| | AGGCACA | A |
| | (SEQ ID NO: 214) | (SEQ ID NO: 215) |
| 8 (EMX1) | AGAAATCCGTCTTTCATTGACGGATGTGATTGATGC | ATGTGATTGATGCCCAAAG |
| | CCAAAGG | G |
| | (SEQ ID NO: 216) | (SEQ ID NO: 217) |
| 9 (EMX1) | AGAAATCCGTCTTTCATTGACGGGGGGAGGCCTGGA | GGGGAGGCCTGGAGTCATG |
| | GTCATGG | G |
| | (SEQ ID NO: 218) | (SEQ ID NO: 219) |
| 10 (EMX1) | AGAAATCCGTCTTTCATTGACGGTATTATTCCCATA | TATTATTCCCATAGGGAAG |
| | GGGAAGG | G |
| | (SEQ ID NO: 220) | (SEQ ID NO: 221) |
| 11 (VEGFA) | AGAAATCCGTCTTTCATTGACGGTGGGGGTGACCGC | TGGGGGTGACCGCCGGAGC |
| | CGGAGCG | G |
| | (SEQ ID NO: 222) | (SEQ ID NO: 223) |
| 12 (VEGFA) | AGAAATCCGTCTTTCATTGACGGAATCCTCCACCAG | AATCCTCCACCAGTCATGG |
| | TCATGGT | T |
| | (SEQ ID NO: 224) | (SEQ ID NO: 225) |
| 13 (VEGFA) | AGAAATCCGTCTTTCATTGACGGGTTGACATTGTCC | GTTGACATTGTCCACACCT |
| | ACACCTG | G |
| | (SEQ ID NO: 226) | (SEQ ID NO: 227) |
| 14 (VEGFA) | AGAAATCCGTCTTTCATTGACGGGGAAATCTATTGA | GGAAATCTATTGAGGCTCT |
| | GGCTCTG | G |
| | (SEQ ID NO: 228) | (SEQ ID NO: 229) |
| 15 (VEGFA) | AGAAATCCGTCTTTCATTGACGGTTAAACTCTCCAT | TTAAACTCTCCATGGACCA |
| | GGACCAG | G |
| | (SEQ ID NO: 230) | (SEQ ID NO: 231) |

[0975] Approximately 16 hours prior to transfection, 100 μl of 25,000 HEK293T cells in DMEM/10% FBS+Pen/Strep were plated into each well of a 96-well plate. On the day of transfection, the cells were 70-90% confluent. For each well to be transfected, a mixture of 0.5 μl of Lipofectamine 2000 and 9.5 μl of Opti-MEM was prepared and then incubated at room temperature for 5-20 minutes (Solution 1). After incubation, the lipofectamine:OptiMEM mixture was added to a separate mixture containing 182 ng of effector plasmid and 14 ng of crRNA and water up to 10 μL (Solution 2). The solution 1 and solution 2 mixtures were mixed by pipetting up and down and then incubated at room temperature for 25 minutes. Following incubation, 20 μL of the Solution 1 and Solution 2 mixture were added dropwise to each well of a 96 well plate containing the cells. 72 hours post transfection, cells are trypsinized by adding 10 μL of TrypLE to the center of each well and incubated for approximately 5 minutes. 100 μL of D10 media was then added to each well and mixed to resuspend cells. The cells were then spun down at 500 g for 10 minutes, and the supernatant was discarded. QuickExtract buffer was added to ⅕ the amount of the original cell suspension volume. Cells were incubated at 65° C. for 15 minutes, 68° C. for 15 minutes, and 98° C. for 10 minutes.

[0976] Samples for Next Generation Sequencing were prepared by two rounds of PCR. The first round (PCR1) was used to amplify specific genomic regions depending on the target. PCR1 products were purified by column purification. Round 2 PCR (PCR2) was done to add Illumina adapters and indexes. Reactions were then pooled and purified by column purification. Sequencing runs were done with a 150 cycle NextSeq v2.5 mid or high output kit.

[0977] FIG. 6A shows targeting of the fifteen genetic regions in Table 18 by wild-type Cas12i2, variant Cas12i2 of SEQ ID NO: 3, and variant Cas12i2 of SEQ ID NO: 4. Edited targets were defined as targets that showed indel levels above background (>0.5% in this assay, marked by the dotted line). Across the same target set, wild-type Cas12i2 edited 10 out of the 15 targets above background but failed to edit 5 out of the 15 targets above background (FIG. 6A and FIG. 6B). Variant Cas12i2 of SEQ ID NO: 3 and variant Cas12i2 of SEQ ID NO: 4, however, edited each of the 15 targets above background (FIG. 6A and FIG. 6B).

[0978] This Example shows that Cas12i2 variant binary complexes demonstrated increased ternary complex formation with target mammalian genes, as compared to wild-type Cas12i2 binary complexes. The Example further shows that the Cas12i2 variants expanded the targeting space by introducing indels in targets unable to be edited by wild-type Cas12i2.

### Example 12—Increased Indel Rates by Cas12i2 Variants

[0979] This Example describes increased enzymatic (e.g., nuclease) activity of Cas12i2 variants, as compared to wild-type Cas12i2, over multiple targets.

[0980] Cas12i2 plasmids and RNA guides were prepared as described in Example 11. The prepared crRNA sequences and their corresponding target sequences are shown in Table 19. Furthermore, cells were transfected and harvested, and samples were prepared for Next Generation sequencing as described in Example 11.

TABLE 19
crRNA and Target Sequences for
Transient Transfection.

| Target | crRNA sequence | Target Sequence |
|---|---|---|
| 1 | AGAAATCCGTCTTTCATTGAC | GGTGAGGGAGGAGAGATG |
| (AAVS1) | GGGGTGAGGGAGGAGAGATGC | CC (SEQ ID NO: 232) |
| | C (SEQ ID NO: 147) | |
| 2 | AGAAATCCGTCTTTCATTGAC | TCTTGAGATGGGCTCGGG |
| (EMX1) | GGTCTTGAGATGGGCTCGGGC | CT (SEQ ID NO: 234) |
| | T (SEQ ID NO: 233) | |
| 3 | AGAAATCCGTCTTTCATTGAC | TCCGCTCTGAGCAAGGCC |
| (VEGFA) | GGTCCGCTCTGAGCAAGGCCC | CA (SEQ ID NO: 236) |
| | A (SEQ ID NO: 235) | |

[0981] Wild-type Cas12i2 and variant Cas12i2 performance was assessed by comparing indels at AAVS1, EMX1, and VEGFA. As shown in FIG. 7A, FIG. 71B, and FIG. 7C, Cas12i2 variants increased indel rates as compared to wild-type Cas12i2 at an AAVS1 target, EMX1 target, and VEGFA target, respectively. The dotted lines demark Cas12i2 indel rates at AAVS1, EMX1, and VEGFA. Sequence identifiers of the Cas12i2 variants corresponding to each bar in the bar graphs of FIG. 7A are indicated in Table 20, and sequence identifiers of the Cas12i2 variants corresponding to each bar in the bar graphs of FIG. 71B and FIG. 7C are indicated in Table 21.

TABLE 20
Cas12i2 Variant Sequences used in
Indel Assay for AAVS1 (FIG. 7A).

| Bar | Cas12i2 SEQ ID NO |
|---|---|
| 1 | 2 (WT) |
| 2 | 3 |
| 3 | 4 |
| 4 | 46 |
| 5 | 5 |
| 6 | 47 |
| 7 | 50 |
| 8 | 51 |
| 9 | 52 |
| 10 | 53 |
| 11 | 54 |
| 12 | 55 |
| 13 | 56 |
| 14 | 57 |
| 15 | 58 |
| 16 | 59 |
| 17 | 60 |
| 18 | 61 |
| 19 | 62 |
| 20 | 63 |
| 21 | 65 |
| 22 | 66 |
| 23 | 67 |
| 24 | 68 |
| 25 | 79 |
| 26 | 84 |
| 27 | 87 |
| 28 | 88 |
| 29 | 89 |
| 30 | 90 |
| 31 | 95 |
| 32 | 96 |
| 33 | 97 |
| 34 | 99 |
| 35 | 101 |
| 36 | 103 |
| 37 | 104 |
| 38 | 112 |
| 39 | 114 |
| 40 | 115 |
| 41 | 116 |
| 42 | 117 |
| 43 | 118 |
| 44 | 123 |
| 45 | 130 |
| 46 | 131 |
| 47 | 130 |

TABLE 21
Cas12i2 Variant Sequences used in Indel Assays
for EMX1 (FIG. 7B) and VEGFA (FIG. 7C)

| Bar | Cas12i2 SEQ ID NO |
|---|---|
| 1 | 2 (WT) |
| 2 | 3 |
| 3 | 4 |
| 4 | 46 |
| 5 | 5 |
| 6 | 47 |
| 7 | 50 |
| 8 | 51 |
| 9 | 52 |
| 10 | 53 |
| 11 | 54 |
| 12 | 55 |
| 13 | 56 |
| 14 | 57 |
| 15 | 58 |
| 16 | 59 |
| 17 | 60 |
| 18 | 61 |
| 19 | 62 |
| 20 | 63 |
| 21 | 65 |
| 22 | 66 |
| 23 | 67 |
| 24 | 68 |
| 25 | 76 |
| 26 | 79 |
| 27 | 84 |
| 28 | 86 |
| 29 | 87 |
| 30 | 88 |
| 31 | 89 |
| 32 | 90 |
| 33 | 95 |
| 34 | 96 |
| 35 | 97 |
| 36 | 99 |
| 37 | 101 |
| 38 | 103 |
| 39 | 104 |
| 40 | 112 |
| 41 | 114 |
| 42 | 115 |
| 43 | 116 |
| 44 | 117 |
| 45 | 118 |
| 46 | 119 |
| 47 | 120 |
| 48 | 121 |
| 49 | 122 |
| 50 | 123 |
| 51 | 124 |

[0982] This Example shows that Cas12i2 variant binary complexes demonstrated increased ternary complex formation with target mammalian genes, as compared to wild-type Cas12i2 binary complexes. Furthermore, not only did Cas12i2 variants introduce indels at target loci not capable of being targeted by wild-type Cas12i2 (Example 11), Cas12i2 variants had increased enzymatic activity at multiple target loci, compared to wild-type Cas12i2.

### Example 13—Efficient Immune Cell Editing with a Cas12i2 Variant

[0983] This Example describes RNP transfection followed by FACS staining and indel assessment on multiple targets using an engineered variant Cas12i2 nuclease (SEQ ID NO: 4) and SpCas9 control in primary T cells.

[0984] CRISPR RNA-guided nucleases have gained considerable interest for their role in revolutionizing existing ex vivo approaches to engineered cell therapies. Here we present a novel engineered Type V CRISPR-Cas variant, Cas12i, as an alternative to the widely used Cas9 and Cpf1 CRISPR nuclease systems. Although effectors of subtypes V-A (Cas12a, also known as Cpf1) and V-B (Cas12b) have been studied in detail, the distinct domain architectures and diverged RuvC sequences of uncharacterized Cas12 proteins suggest unexplored functional diversity (Yan et al., Science 363(6422):88-91, 2019). In an effort to uncover such functional diversity, rigorous characterization of Cas12i revealed therapeutically differentiating attributes over classical gene modification nucleases, including compact size (1054 amino acid protein, 43 nucleotide tracr-less guide RNA), the validation of an optimal T-rich PAM in mammalian cells, distinct editing outcomes, and potential for multiplexing. We engaged in a high-throughput evaluation of engineered variants of Cas12i resulting in a Cas12i variant that yielded dramatically increased (˜40-fold) activity over the original Cas12i and has enhanced specificity as compared to SpCas9. RNP-mediated delivery of the Cas12i variant to T cells targeting therapeutically relevant loci revealed robust editing (>90% indel across multiple targets and donors). Additionally, specificity studies using in silico prediction coupled with targeted NGS sequencing demonstrated the robust activity and specificity of the Cas12i variant. Taken together, these data show that this variant of Cas12i is uniquely differentiated to enable robust and precise engineered cell therapies. Details of these studies are as follows.

[0985] CD3+ T cells from three individual donors were revived and counted using an automated cell counter. A sample from each donor was collected and stained for CD3E and DAPI for flow cytometry analysis of surface expression and viability, respectively. Cell density was adjusted to 1e6 cells/mL and cells were stimulated for 3 days with a cocktail of anti-CD3:CD28 antibodies.

[0986] Variant Cas12i2 RNP complexation reactions were made by mixing purified variant Cas12i2 (400 μM; SEQ ID NO: 4) with crRNA (1 mM in 250 mM NaCl; see sequences in Tables 13 and 14) at a 1:1 (effector:crRNA) volume ratio (2.5:1 crRNA:effector molar ratio). SpCas9 RNP complexation reactions were made by mixing purified SpCas9 (Aldevron; 62 μM) with sgRNA (1 mM in water; see sequences in Table 22) at a 6.45:1 (effector:sgRNA) volume ratio (2.5:1 sgRNA:effector molar ratio). For “effector only” controls, variant Cas12i2 or SpCas9 were mixed with Protein Storage Buffer (25 mM Tris, pH 7.5, 250 m NaCl, 1 mM TCEP, 50% glycerol) at the same volume ratio as the crRNA or sgRNA, respectively. Additional controls were included: SpCas9 (Aldevron) with either Lethal #1 (transfection control guide), pooled CD3, or ROSA26 sgRNAs and SpCas9 (Horizon) with either Lethal #1, pooled CD3, or ROSA26 sgRNAs. Complexations were incubated at 37° C. for 30-60 min. Following incubation, RNPs were diluted to 20 μM, 50 μM, 100 μM, or 160 μM effector concentration for variant Cas12i2 and 20 μM or 50 μM for SpCas9.

TABLE 22
crRNA and sgRNA sequences for RNP transfection
(SEQ ID NOs: 237-241).

| | | | | Target | |
|---|---|---|---|---|---|
| Guide Name | Gene | Effector | PAM | Strand | crRNA/sgRNA |
| Cas1212_B2M | B2M | Cas12i2 | CTTC | TS | rArGrArArArUrCrCrGrUrCrUrUrUrCrArU |
| exon2_target4 | | | | | rUrGrArCrGrGrArArUrGrUrCrGrGrArUr |
| | | | | | GrGrArUrGrArArArCrC |
| Cas12i2_B2M | B2M | Cas12i2 | CTTT | BS | rArGrArArArUrCrCrGrUrCrUrUrUrCrArU |
| exon2_target8 | | | | | rUrGrArCrGrGrCrUrArUrCrUrCrUrUrGrU |
| | | | | | rArCrUrArCrArCrUrG |
| Cas12i2_B2M | B2M | Cas12i2 | GTTC | TS | rArGrArArArUrCrCrGrUrCrUrUrUrCrArU |
| exon2_target10 | | | | | rUrGrArCrGrGrArCrArCrGrGrCrArGrGrC |
| | | | | | rArUrArCrUrCrArUrC |
| Cas12i2_B2M | B2M | Cas12i2 | CTTT | BS | rArGrArArArUrCrCrGrUrCrUrUrUrCrArU |
| exon2_target11 | | | | | rUrGrArCrGrGrGrUrCrArCrArGrCrCrCrA |
| | | | | | rArGrArUr ArGrUrUrA |
| SpCas9_B2M | B2M | SpCas9 | TGG | BS | mG*mG*mC*rCrGrArGrArUrGrUrCrUrCr |
| exon1_target1 | | | | | GrCrUrCrCrGrGrUrUrUrUrArGrArGrCrUr |
| | | | | | ArGrArAr ArUrArGrCrArArGrUrUrArArA |
| | | | | | rArUrArArGrGrCrUrArGrUrCrCrGrUrUrA |
| | | | | | rUrCrArArCrUrUrGrArArArArArGrUrGr |
| | | | | | GrCrArCrCrGrArGrUrCrGrGrUrGrCmU* |
| | | | | | mU*mU*rU |

TABLE 23
crRNA and sgRNA sequences for RNP transfection (SEQ ID NOs: 242-251).

| | | | | Target | |
|---|---|---|---|---|---|
| Guide Name | Gene | Effector | PAM | Strand | crRNA/sgRNA |
| Cas12i2_TRAC_ | TRAC | Cas12i2 | CTTC | TS | rArGrArArArUrCrCrGrUrCrUrUrUrCrAr |
| exon1_target3 | | | | | UrUrGrArCrGrGrArArGrArGrCrArArCr |
| | | | | | ArGrUrGrCrUrGrUrGrGrC |
| Cas1212_TRAC | TRAC | Cas12i2 | CTTC | BS | rArGrArArArUrCrCrGrUrCrUrUrUrCrAr |
| exon1_target5 | | | | | UrUrGrArCrGrGrArArCrArArCrArGrCr |
| | | | | | ArUrUrArUrUrCrCrArGrA |
| Cas12i2_TRAC_ | TRAC | Cas12i2 | CTTT | TS | rArGrArArArUrCrCrGrUrCrUrUrUrCrAr |
| exon2_target4 | | | | | UrUrGrArCrGrGrGrArArArCrArGrGrUr |
| | | | | | ArArGrArCrArGrGrGrGrU |
| Cas12i2_TRAC_ | TRAC | Cas12i2 | CTTT | BS | rArGrArArArUrCrCrGrUrCrUrUrUrCrAr |
| exon3_target4 | | | | | UrUrGrArCrGrGrCrArGrGrArGrGrArGr |
| | | | | | GrArUrUrCrGrGrArArCrC |
| SpCas9_TRAC_ | TRAC | SpCas9 | TGG | BS | mA*mA*mG*rUrUrCrCrUrGrUrGrArUr |
| exon2_target1 | | | | | GrUrCrArArGrCrGrUrUrUrUrArGrArGr |
| | | | | | CrUrArGrArArArUrArGrCrArArGrUrUr |
| | | | | | ArArArArUrArArGrGrCrUrArGrUrCrCr |
| | | | | | GrUrUrArUrCrArArCrUrUrGrArArArAr |
| | | | | | ArGrUrGrGrCrArCrCrGrArGrUrCrGrGr |
| | | | | | UrGrCmU*mU*mU*rU |
| Cas1212_PDCD1_ | PDCD1 | Cas12i2 | GTTC | BS | rArGrArArArUrCrCrGrUrCrUrUrUrCrAr |
| exon1_target1 | | | | | UrUrGrArCrGrGrUrUrArGrGrUrArGrGr |
| | | | | | UrGrGrGrGrUrCrGrGrCrG |
| Cas1212_PDCD1_ | PDCD1 | Cas12i2 | CTTC | BS | rArGrArArArUrCrCrGrUrCrUrUrUrCrAr |
| exon2_target7 | | | | | UrUrGrArCrGrGrCrCrCrGrArGrGrArCr |
| | | | | | CrGrCrArGrCrCrArGrCrC |
| Cas12i2_PDCD1_ | PDCD1 | Cas12i2 | CTTC | BS | rArGrArArArUrCrCrGrUrCrUrUrUrCrAr |
| exon2_target8 | | | | | UrUrGrArCrGrGrCrGrUrGrUrCrArCrAr |
| | | | | | CrArArCrUrGrCrCrCrArA |
| Cas12i2_PDCD1_ | PDCD1 | Cas12i2 | CTTC | BS | rArGrArArArUrCrCrGrUrCrUrUrUrCrAr |
| exon2_target9 | | | | | UrUrGrArCrGrGrCrArCrArUrGrArGrCr |
| | | | | | GrUrGrGrUrCrArGrGrGrC |
| SpCas9_PDCD1_ | PDCD1 | SpCas9 | AGG | BS | mU*mC*mC*rArGrGrCrArUrGrCrArGr |
| exon1_target1 | | | | | ArUrCrCrCrArCrGrUrUrUrUrArGrArGr |
| | | | | | CrUrArGrArArArUrArGrCrArArGrUrUr |
| | | | | | ArArArArUrArArGrGrCrUrArGrUrCrCr |
| | | | | | GrUrUrArUrCrArArCrUrUrGrArArArAr |
| | | | | | ArGrUrGrGrCrArCrCrGrArGrUrCrGrGr |
| | | | | | UrGrCmU*mU*mU*rU |

[0987] Diluted complexed reactions were dispensed at 2 μL per well into a 384-well electroporation plate. Cell suspensions were collected and counted using an automated cell counter. Cell density was adjusted to 1.1e7 cells/mL in P3 buffer and was dispensed at 2e5 cells/reaction (18 μL). Final concentration of variant Cas12i2 RNPs was 2 μM, 5 μM, 10 μM, or 16 μM. Final concentration of SpCas9 RNPs was 2 or 5 μM. The following controls were set up: unelectroporated cells only, cells in P3 primary cell buffer (Lonza #VXP-3032) only, cells in Protein Storage Buffer only. The plate was electroporated using an electroporation device (program EO-115-AA, Lonza H T), excluding the unelectroporated conditions. Each well was split into four 96-well editing plates (containing 200 μL total volume) using robotics (StarLab Hamilton). Editing plates were incubated for 7 days at 37° C. with 100 μL media replacement at day 4. After 7 days, plates were spun down and the supernatant was removed. Pellets were resuspended in 200 μL of PBS. 100 μL of sample was collected and stained with either the antibody panel (anti-B2M, anti-TRAC, anti-PD1) or anti-CD3E antibody (lethal #1, pooled CD3E, ROSA26, Protein Storage Buffer and unelectroporated for Cas9 controls). All cells were stained with DAPI to assess viability. Remaining cell suspension was transferred to a 96-well PCR plate and pelleted at 500×g for 5 min. Supernatants were removed and pellets were frozen at −80° C.

[0988] For gDNA extraction, pellets were thawed to room temperature and resuspended in appropriate volume of DNA extraction buffer (QuickExtract) to give final concentration of 1000 cells/μL. Samples were then cycled in PCR machine at 65° C. for 15 min, 68° C. for 15 min, 98° C. for 10 min. Samples were then frozen at −20° C.

[0989] Samples for Next Generation Sequencing (NGS) were prepared by rounds of PCR. The first round (PCR I) was used to amplify the genomic regions flanking the target site and add NGS adapters. The second round (PCR II) was used to add NGS indexes. Reactions were then pooled, purified by column purification, and quantified on a fluorometer (Qubit). Sequencing runs were done using a 150 cycle NGS instrument (NextSeq v2.5) mid or high output kit and run on an NGS instrument (NextSeq 550).

[0990] For NGS analysis, the indel mapping function used a sample's fastq file, the amplicon reference sequence, and the forward primer sequence. For each read, a kmer-scanning algorithm was used to calculate the edit operations (match, mismatch, insertion, deletion) between the read and the reference sequence. In order to remove small amounts of primer dimer present in some samples, the first 30 nt of each read was required to match the reference and reads where over half of the mapping nucleotides were mismatches were filtered out as well. Up to 50,000 reads passing those filters were used for analysis, and reads were counted as an indel read if they contained an insertion or deletion. The indel % was calculated as the number of indel-containing reads divided by the number of reads analyzed (reads passing filters up to 50,000). The QC standard for the minimum number of reads passing filters was 10,000.

[0991] These results demonstrated robust indel activity by variant Cas12i2 RNP targeting multiple B2M targets in primary T cells (FIG. 8), with activity peaking at 16 μM. Flow cytometry staining showed significant reduction of B2M protein expression in T cells following variant Cas12i2 RNP (FIG. 9). The results additionally show indels in TRAC and PDCD1 induced by variant Cas12i2 RNP targeting in primary T cells (FIG. 11A and FIG. 12A, respectively). Cell viability remained high for all conditions seven days post electroporation of the Cas12i2 RNPs targeting B2M (FIG. 10), the Cas12i2 RNPs targeting TRAC (FIG. 11B), and the Cas12i2 RNPs targeting PDCD1 (FIG. 12B).

[0992] This Example shows that Cas12i2 variant binary complexes (e.g., variant Cas12i2 RNPs) formed stable ternary complexes with multiple targets and have activity in primary T cells. This Example further shows that variant Cas12i2 formed a stable binary complex (e.g., RNP) that had increased (on target) binding affinity to a target nucleic acid and had activity in primary T cells.

### Example 14—Determination of Off-Target Enzymatic Activity by Cas12i2 Variants

[0993] This Example describes methods for assessing nuclease activity of a Cas12i2 binary complex at on-target and non-target loci.

[0994] The target sequences in Table 24 were selected for this assay. For each target sequence, potential non-target sites were identified by searching for other genomic sequences adjacent to a PAM sequence and calculating the Levenshtein distance between the target sequence and the PAM-adjacent sequences. The Levenshtein distance (e.g., edit distance) corresponds to the minimum number of edits (e.g., insertions, deletions, or substitutions) required to change one sequence into another (e.g., to change the sequence of a potential non-target locus into the sequence of the on-target locus), as shown in FIG. 13. Potential non-target sequences with an edit distance of 1, 2, 3, or 4 were chosen and are shown in Table 25.

TABLE 24
On-target sequences and corresponding crRNA sequences.

| Target | | |
|---|---|---|
| Locus | Target | crRNA |
| AAVS1_ | TGTCCCCCCAAGTTTTGGAC | AGAAATCCGTCTTTCATTGACGGTGTCCCCCCAAGT |
| T1 | (SEQ ID NO: 252) | TTTGGAC (SEQ ID NO: 253) |
| AAVS1_ | GGAGAGGTGAGGGACTTGGG | AGAAATCCGTCTTTCATTGACGGGGAGAGGTGAGGG |
| T2 | (SEQ ID NO: 254) | ACTTGGG (SEQ ID NO: 255) |
| AAVS1_ | GTGAGAATGGTGCGTCCTAG | AGAAATCCGTCTTTCATTGACGGGTGAGAATGGTGC |
| T3 | (SEQ ID NO: 256) | GTCCTAG (SEQ ID NO: 257) |
| AAVS1_ | GGGGTTGTCCAGAAAAACGG | AGAAATCCGTCTTTCATTGACGGGGGGTTGTCCAGA |
| T4 | (SEQ ID NO: 258) | AAAACGG (SEQ ID NO: 259) |
| AAVS1_ | AACTGGCCCTGGCTTTGGCA | AGAAATCCGTCTTTCATTGACGGAACTGGCCCTGGC |
| T5 | (SEQ ID NO: 260) | TTTGGCA (SEQ ID NO: 261) |
| AAVS1_ | GTAGCCTCTCCCGCTCTGGT | AGAAATCCGTCTTTCATTGACGGGTAGCCTCTCCCG |
| T6 | (SEQ ID NO: 262) | CTCTGGT (SEQ ID NO: 263) |
| AAVS1_ | GGGAAGTGGTTGGTCAGCAT | AGAAATCCGTCTTTCATTGACGGGGGAAGTGGTTGG |
| T7 | (SEQ ID NO: 264) | TCAGCAT (SEQ ID NO: 265) |
| AAVS1_ | AGCGGGTATGGGAAGGGCTT | AGAAATCCGTCTTTCATTGACGGAGCGGGTATGGGA |
| T8 | (SEQ ID NO: 266) | AGGGCTT (SEQ ID NO: 267) |
| EMX1_T1 | GGGCGCAGGGCCACCTGGAC | AGAAATCCGTCTTTCATTGACGGGGGCGCAGGGCCA |
| | (SEQ ID NO: 268) | CCTGGAC (SEQ ID NO: 269) |
| EMX1_T2 | GGATGGCGACTTCAGGCACA | AGAAATCCGTCTTTCATTGACGGGGATGGCGACTTC |
| | (SEQ ID NO: 270) | AGGCACA (SEQ ID NO: 271) |
| EMX1_T3 | ATGTGATTGATGCCCAAAGG | AGAAATCCGTCTTTCATTGACGGATGTGATTGATGC |
| | (SEQ ID NO: 272) | CCAAAGG (SEQ ID NO: 273) |
| EMX1_T4 | GGGGAGGCCTGGAGTCATGG | AGAAATCCGTCTTTCATTGACGGGGGGAGGCCTGGA |
| | (SEQ ID NO: 274) | GTCATGG (SEQ ID NO: 275) |
| EMX1_T5 | TATTATTCCCATAGGGAAGG | AGAAATCCGTCTTTCATTGACGGTATTATTCCCATA |
| | (SEQ ID NO: 276) | GGGAAGG (SEQ ID NO: 277) |
| EMX1_T6 | GAGCCAGTGTTGCTAGTCAA | AGAAATCCGTCTTTCATTGACGGGAGCCAGTGTTGC |
| | (SEQ ID NO: 278) | TAGTCAA (SEQ ID NO: 279) |
| EMX1_T7 | AGCAAGGGACTATTCAGGGA | AGAAATCCGTCTTTCATTGACGGAGCAAGGGACTAT |
| | (SEQ ID NO: 280) | TCAGGGA (SEQ ID NO: 281) |
| EMX1_T8 | AAAATTGAGCAATCTACCCT | AGAAATCCGTCTTTCATTGACGGAAAATTGAGCAAT |
| | (SEQ ID NO: 282) | CTACCCT (SEQ ID NO: 283) |
| VEGFA_ | TGGGGGTGACCGCCGGAGCG | AGAAATCCGTCTTTCATTGACGGTGGGGGTGACCGC |
| T1 | (SEQ ID NO: 284) | CGGAGCG (SEQ ID NO: 285) |
| VEGFA_ | AATCCTCCACCAGTCATGGT | AGAAATCCGTCTTTCATTGACGGAATCCTCCACCAG |
| T2 | (SEQ ID NO: 286) | TCATGGT (SEQ ID NO: 287) |
| VEGFA_ | GTTGACATTGTCCACACCTG | AGAAATCCGTCTTTCATTGACGGGTTGACATTGTCC |
| T3 | (SEQ ID NO: 288) | ACACCTG (SEQ ID NO: 289) |
| VEGFA_ | GGAAATCTATTGAGGCTCTG | AGAAATCCGTCTTTCATTGACGGGGAAATCTATTGA |
| T4 | (SEQ ID NO: 290) | GGCTCTG (SEQ ID NO: 291) |
| VEGFA_ | TTAAACTCTCCATGGACCAG | AGAAATCCGTCTTTCATTGACGGTTAAACTCTCCAT |
| T5 | (SEQ ID NO: 292) | GGACCAG (SEQ ID NO: 293) |
| VEGFA_ | GCCCATACTGGGGACCAAGG | AGAAATCCGTCTTTCATTGACGGGCCCATACTGGGG |
| T6 | (SEQ ID NO: 294) | ACCAAGG (SEQ ID NO: 295) |
| VEGFA_ | GCCGTAACCCTTCGTGGGTA | AGAAATCCGTCTTTCATTGACGGGCCGTAACCCTTC |
| T7 | (SEQ ID NO: 296) | GIGGGTA (SEQ ID NO: 297) |
| VEGFA_ | AGCTCTCGTGGGGGIGGGTC | AGAAATCCGTCTTTCATTGACGGAGCTCTCGTGGGG |
| T8 | (SEQ ID NO: 298) | GTGGGTC (SEQ ID NO: 299) |

TABLE 25
Non-target loci sequences and edit distances.

| Target | Non-target | Edit | Non-target |
|---|---|---|---|
| Locus | Reference | Distance | Locus Sequence |
| AAVS1_T1 | OT-0 | 2 | TGTCCCCCCAAGATTTGGAT |
| | | | (SEQ ID NO: 300) |
| AAVS1_T1 | OT-1 | 2 | TGTCCCCCAAACTTTTGGAC |
| | | | (SEQ ID NO: 301) |
| AAVS1_T1 | OT-2 | 3 | TGTCTCCGCCAAGTTTTGGA |
| | | | (SEQ ID NO: 302) |
| AAVS1_T1 | OT-3 | 3 | GTCCCCCAAAGCTTTTGGAC |
| | | | (SEQ ID NO: 303) |
| AAVS1_T1 | OT-4 | 3 | TGTCCCCAGAAGTTTTGGAA |
| | | | (SEQ ID NO: 304) |
| AAVS1_T1 | OT-5 | 3 | AGTCCCCCCAAGTCCTGGAC |
| | | | (SEQ ID NO: 305) |
| AAVS1_T1 | OT-6 | 3 | TGTCTCCACCAAGTTTTGGC |
| | | | (SEQ ID NO: 306) |
| AAVS1_T1 | OT-7 | 3 | TGTCCCCCCAAGTGTTGAAA |
| | | | (SEQ ID NO: 307) |
| AAVS1_T2 | OT-0 | 2 | GGAGGGGTGAGGGAGTTGGG |
| | | | (SEQ ID NO: 308) |
| AAVS1_T2 | OT-1 | 2 | GGAGTGGTGAGGGACTTGAG |
| | | | (SEQ ID NO: 309) |
| AAVS1_T2 | OT-2 | 2 | GGAGAGGATGGGGACTTGGG |
| | | | (SEQ ID NO: 310) |
| AAVS1_T2 | OT-3 | 2 | GAGAGGTGAGGGACTTGGGG |
| | | | (SEQ ID NO: 311) |
| AAVS1_T2 | OT-4 | 3 | GGAGAGGTGGGGGTGTTGGG |
| | | | (SEQ ID NO: 312) |
| AAVS1_T2 | OT-5 | 3 | GGGAGGCTGAGGCACTTGGG |
| | | | (SEQ ID NO: 313) |
| AAVS1_T2 | OT-6 | 3 | GGAGAGGGGAAGGATTTGGG |
| | | | (SEQ ID NO: 314) |
| AAVS1_T2 | OT-7 | 3 | GGAGAGGAGAGGGTACTTGG |
| | | | (SEQ ID NO: 315) |
| AAVS1_T3 | OT-0 | 2 | TGAGAATGGTGCGTCCTAGG |
| | | | (SEQ ID NO: 316) |
| AAVS1_T3 | OT-1 | 3 | GTGAGAATGGTGTGTCTTAC |
| | | | (SEQ ID NO: 317) |
| AAVS1_T3 | OT-2 | 3 | CTGAGAATGGTGGTCTCTAG |
| | | | (SEQ ID NO: 318) |
| AAVS1_T3 | OT-3 | 3 | GTGTGAATGGTGCTTCCTGG |
| | | | (SEQ ID NO: 319) |
| AAVS1_T3 | OT-4 | 3 | GTGGGAATGGCGCCTCCTAG |
| | | | (SEQ ID NO: 320) |
| AAVS1_T3 | OT-5 | 3 | CTGAGAATGGTGCTTTCTAG |
| | | | (SEQ ID NO: 321) |
| AAVS1_T3 | OT-6 | 3 | GATGAAATGGTGCTTCCTAG |
| | | | (SEQ ID NO: 322) |
| AAVS1_T3 | OT-7 | 3 | GTGAGAATGGTTCTGTCTAG |
| | | | (SEQ ID NO: 323) |
| AAVS1_T4 | OT-0 | 2 | GGGTTGTCCAGAAAAACGGT |
| | | | (SEQ ID NO: 324) |
| AAVS1_T4 | OT-1 | 2 | GAGGGTTGTCCAGAAAAAGG |
| | | | (SEQ ID NO: 325) |
| AAVS1_T4 | OT-2 | 3 | GGGGTGCTCCAGAAAAACGT |
| | | | (SEQ ID NO: 326) |
| AAVS1_T4 | OT-3 | 3 | GGGTTCTCCAGAAAAACGGA |
| | | | (SEQ ID NO: 327) |
| AAVS1_T4 | OT-4 | 3 | GGGTGTTGCCCAGAAAAAGG |
| | | | (SEQ ID NO: 328) |
| AAVS1_T4 | OT-5 | 3 | GGTGTTGTCCAGAAAGACGT |
| | | | (SEQ ID NO: 329) |
| AAVS1_T4 | OT-6 | 3 | AGGGTTGTCCCAGAAAAAGG |
| | | | (SEQ ID NO: 330) |
| AAVS1_T4 | OT-7 | 3 | TGGGTTGTATAGAAAAACGG |
| | | | (SEQ ID NO: 331) |
| AAVS1_T5 | OT-0 | 2 | ACTGGCCCTGGCTTTGGCAG |
| | | | (SEQ ID NO: 332) |
| AAVS1_T5 | OT-1 | 2 | AACTGGCCCTGGCTCTGGCC |
| | | | (SEQ ID NO: 333) |
| AAVS1_T5 | OT-2 | 3 | CAATGCCCCTGGCTTTGGCA |
| | | | (SEQ ID NO: 334) |
| AAVS1_T5 | OT-3 | 3 | AAACTGGCCCTGGCTCTGGC |
| | | | (SEQ ID NO: 335) |
| AAVS1_T5 | OT-4 | 3 | ACTGACCCTGGCTTATGGCA |
| | | | (SEQ ID NO: 336) |
| AAVS1_T5 | OT-5 | 3 | CCCTGGCTCTGGCTTTGGCA |
| | | | (SEQ ID NO: 337) |
| AAVS1_T5 | OT-6 | 3 | AATGGCCACTGGATTTGGCA |
| | | | (SEQ ID NO: 338) |
| AAVS1_T5 | OT-7 | 3 | AACTGTCCCTGGGCTTTGCA |
| | | | (SEQ ID NO: 339) |
| AAVS1_T6 | OT-0 | 2 | TAGCCTCTCCCGCTCTGGTT |
| | | | (SEQ ID NO: 340) |
| AAVS1_T6 | OT-1 | 3 | GCAGCCACTCCCTCTCTGGT |
| | | | (SEQ ID NO: 341) |
| AAVS1_T6 | OT-2 | 3 | GTAGACTCTCTCTCTCTGGT |
| | | | (SEQ ID NO: 342) |
| AAVS1_T6 | OT-3 | 3 | AGTGCCTCTCCTGCTCTGGT |
| | | | (SEQ ID NO: 343) |
| AAVS1_T6 | OT-4 | 3 | GTTAGCCTCTCCCTCTCTGT |
| | | | (SEQ ID NO: 344) |
| AAVS1_T6 | OT-5 | 3 | GAGTTCTCTCCCGCTCTGGT |
| | | | (SEQ ID NO: 345) |
| AAVS1_T6 | OT-6 | 3 | TAGCCTCACCTCGCTCTGGT |
| | | | (SEQ ID NO: 346) |
| AAVS1_T6 | OT-7 | 3 | GTAGTCCTCTCCCTCTCTGG |
| | | | (SEQ ID NO: 347) |
| AAVS1_T7 | OT-0 | 2 | GGGCAGTGGTTGGTGAGCAT |
| | | | (SEQ ID NO: 348) |
| AAVS1_T7 | OT-1 | 2 | GGGAGTGGTTGGTCATGCAT |
| | | | (SEQ ID NO: 349) |
| AAVS1_T7 | OT-2 | 2 | GGTAAGTGCTTGGTCAGCAT |
| | | | (SEQ ID NO: 350) |
| AAVS1_T7 | OT-3 | 2 | GGAAGTGGTTGGTCAGCATG |
| | | | (SEQ ID NO: 351) |
| AAVS1_T7 | OT-4 | 3 | GGGAAATGGTTTGTCAGCAG |
| | | | (SEQ ID NO: 352) |
| AAVS1_T7 | OT-5 | 3 | GGGAAGTGATTAGGTCACAT |
| | | | (SEQ ID NO: 353) |
| AAVS1_T7 | OT-6 | 3 | GGGAAGTTTTTGGTCATCAT |
| | | | (SEQ ID NO: 354) |
| AAVS1_T7 | OT-7 | 3 | GGAAAGTTGTTGGGCAGCAT |
| | | | (SEQ ID NO: 355) |
| AAVS1_T8 | OT-0 | 2 | AGCGGGTAGGGAAGGGTCTT |
| | | | (SEQ ID NO: 356) |
| AAVS1_T8 | OT-1 | 2 | GCGGGTATGGGAAGGGCTTT |
| | | | (SEQ ID NO: 357) |
| AAVS1_T8 | OT-2 | 3 | ACGCAGGATGGGAAGGGCTT |
| | | | (SEQ ID NO: 358) |
| AAVS1_T8 | OT-3 | 3 | AGCGGCTATGGGGAGGCCTT |
| | | | (SEQ ID NO: 359) |
| AAVS1_T8 | OT-4 | 3 | AGTAGGTATGGGAAGGGCCT |
| | | | (SEQ ID NO: 360) |
| AAVS1_T8 | OT-5 | 3 | AGAGGGTATGGGAATGGCTA |
| | | | (SEQ ID NO: 361) |
| AAVS1_T8 | OT-6 | 3 | AGCAGGTGAGGGAAGGGCTT |
| | | | (SEQ ID NO: 362) |
| AAVS1_T8 | OT-7 | 3 | AGTGGGTCTGGGTAGGGCTT |
| | | | (SEQ ID NO: 363) |
| EMX1 T1 | OT-0 | 2 | GGCGCAGGGCCACCTGGACC |
| | | | (SEQ ID NO: 364) |
| EMX1_T1 | OT-1 | 3 | GGGGCAGGGCCACCTGTAGC |
| | | | (SEQ ID NO: 365) |
| EMX1_T1 | OT-2 | 3 | GTGCCCAGGGCCACCCGGAC |
| | | | (SEQ ID NO: 366) |
| EMX1_T1 | OT-3 | 3 | GTTGCGCAGGGCCACTGGAC |
| | | | (SEQ ID NO: 367) |
| EMX1_T1 | OT-4 | 3 | GGGCGTGGGGCAACCTGGAC |
| | | | (SEQ ID NO: 368) |
| EMX1_T1 | OT-5 | 3 | GGCGCAGGGCACACCGGGAC |
| | | | (SEQ ID NO: 369) |
| EMX1_T1 | OT-6 | 3 | GGGCACAGGGGCCACCTGGA |
| | | | (SEQ ID NO: 370) |
| EMX1_T1 | OT-7 | 3 | AGGCACAGGGCCACTTGGAC |
| | | | (SEQ ID NO: 371) |
| EMX1_T2 | OT-0 | 2 | GATGGCGACTTCAGGCACAG |
| | | | (SEQ ID NO: 372) |
| EMX1 T2 | OT-1 | 3 | GATAGGCGATTTCAGGCACA |
| | | | (SEQ ID NO: 373) |
| EMX1_T2 | OT-2 | 3 | GGATGGCGACTGTAAGGCAA |
| | | | (SEQ ID NO: 374) |
| EMX1 T2 | OT-3 | 3 | GGATGGCGAATACAGGAACA |
| | | | (SEQ ID NO: 375) |
| EMX1 T2 | OT-4 | 3 | GCAGGGCGACTTCAGACACA |
| | | | (SEQ ID NO: 376) |
| EMX1 T2 | OT-5 | 3 | GGATGGCGAATTCAGTCACT |
| | | | (SEQ ID NO: 377) |
| EMX1 T2 | OT-6 | 4 | TGATGGAGAAATCAGGCACA |
| | | | (SEQ ID NO: 378) |
| EMX1 T2 | OT-7 | 4 | GGATGGGGCCTCCAGGCTCA |
| | | | (SEQ ID NO: 379) |
| EMX1_T3 | OT-0 | 2 | ATGTGACTTGAGCCCAAAGG |
| | | | (SEQ ID NO: 380) |
| EMX1_T3 | OT-1 | 2 | ATGTGATTTTTGCCCAAAGG |
| | | | (SEQ ID NO: 381) |
| EMX1 T3 | OT-2 | 2 | TGTGATTGATGCCCAAAGGT |
| | | | (SEQ ID NO: 382) |
| EMX1_T3 | OT-3 | 3 | ATGTAATTATGCCCCAAAGG |
| | | | (SEQ ID NO: 383) |
| EMX1_T3 | OT-4 | 3 | ATGTGATTGTTGACCAAATG |
| | | | (SEQ ID NO: 384) |
| EMX1_T3 | OT-5 | 3 | CTGTGATAGAAGCCCAAAGG |
| | | | (SEQ ID NO: 385) |
| EMX1_T3 | OT-6 | 3 | ATATGATAGATGCCCAAATG |
| | | | (SEQ ID NO: 386) |
| EMX1_T3 | OT-7 | 3 | ATTTGATGGAAGCCCAAAGG |
| | | | (SEQ ID NO: 387) |
| EMX1 T4 | OT-0 | 2 | GTGGAGTCCTGGAGTCATGG |
| | | | (SEQ ID NO: 388) |
| EMX1 T4 | OT-1 | 2 | GGGAGGCCTGGAGTCATGGC |
| | | | (SEQ ID NO: 389) |
| EMX1 T4 | OT-2 | 2 | GTGGGAGGCCTGGAGCATGG |
| | | | (SEQ ID NO: 390) |
| EMX1 T4 | OT-3 | 2 | GGGGAGGGTTGGAGTCATGG |
| | | | (SEQ ID NO: 391) |
| EMX1 T4 | OT-4 | 3 | GGGGAGGCCTGGAGATGATG |
| | | | (SEQ ID NO: 392) |
| EMX1 T4 | OT-5 | 3 | GGGAGGCCTCAGAGTCATGG |
| | | | (SEQ ID NO: 393) |
| EMX1 T4 | OT-6 | 3 | GGGAGGCCTTGGAATCATGG |
| | | | (SEQ ID NO: 394) |
| EMX1 T4 | OT-7 | 3 | GTGGAGTGCCTGGAGCATGG |
| | | | (SEQ ID NO: 395) |
| EMX1 T5 | OT-0 | 2 | TTATTATTCCCATGGGAAGG |
| | | | (SEQ ID NO: 396) |
| EMX1_T5 | OT-1 | 2 | TATTATTCCCATATTGAAGG |
| | | | (SEQ ID NO: 397) |
| EMX1_T5 | OT-2 | 2 | ATTATTCCCATAGGGAAGGG |
| | | | (SEQ ID NO: 398) |
| EMX1_T5 | OT-3 | 2 | TATTAATCCTATAGGGAAGG |
| | | | (SEQ ID NO: 399) |
| EMX1 T5 | OT-4 | 3 | TATTATGCCCATAGAGAAGA |
| | | | (SEQ ID NO: 400) |
| EMX1_T5 | OT-5 | 3 | TATTATTCTCAAAGGGGAGG |
| | | | (SEQ ID NO: 401) |
| EMX1_T5 | OT-6 | 3 | TATTTTTCCCATAGTGAAGA |
| | | | (SEQ ID NO: 402) |
| EMX1_T5 | OT-7 | 3 | TATTGTTCTCATAGAGAAGG |
| | | | (SEQ ID NO: 403) |
| EMX1_T6 | OT-0 | 2 | AGCCAGTGTTGCTAGTCAAG |
| | | | (SEQ ID NO: 404) |
| EMX1_T6 | OT-1 | 3 | GTAGCCGTGTTGCTAGTGAA |
| | | | (SEQ ID NO: 405) |
| EMX1 T6 | OT-2 | 3 | GAGCCACTGTTGGTACTCAA |
| | | | (SEQ ID NO: 406) |
| EMX1 T6 | OT-3 | 3 | GAGGCAGTGTTGCATAGCAA |
| | | | (SEQ ID NO: 407) |
| EMX1_T6 | OT-4 | 3 | GAGACAGIGTGGCAAGTCAA |
| | | | (SEQ ID NO: 408) |
| EMX1 T6 | OT-5 | 3 | CAGCCATTGTTGCTAGGCAA |
| | | | (SEQ ID NO: 409) |
| EMX1 T6 | OT-6 | 3 | TGCCAGTGTTGCTAAGTCAA |
| | | | (SEQ ID NO: 410) |
| EMX1 T6 | OT-7 | 3 | GAGCCACTGTTGAAAGTCAA |
| | | | (SEQ ID NO: 411) |
| EMX1 T7 | OT-0 | 3 | AGCCAGGGACTTTTCAGGGC |
| | | | (SEQ ID NO: 412) |
| EMX1_T7 | OT-1 | 3 | TGCAGGGGACTATTCAGAGA |
| | | | (SEQ ID NO: 413) |
| EMX1 T7 | OT-2 | 3 | AGCCAGGGACTTTTCAGGGC |
| | | | (SEQ ID NO: 414) |
| EMX1 T7 | OT-3 | 3 | ATCAAGGCACAATTCAGGGA |
| | | | (SEQ ID NO: 415) |
| EMX1 T7 | OT-4 | 3 | AGGAAGGGACTCTTCAGAGA |
| | | | (SEQ ID NO: 416) |
| EMX1 T7 | OT-5 | 3 | AGCAAGGGCCTTTCCAGGGA |
| | | | (SEQ ID NO: 417) |
| EMX1 T7 | OT-6 | 3 | AGCAAGTGATATTCAGGAGA |
| | | | (SEQ ID NO: 418) |
| EMX1 T7 | OT-7 | 3 | AGCAGGGGACATTCCAGGGA |
| | | | (SEQ ID NO: 419) |
| EMX1_T8 | OT-0 | 2 | AAATTGAGCAATCTACCCTG |
| | | | (SEQ ID NO: 420) |
| EMX1 T8 | OT-1 | 3 | AACTATTGAGCAATCTCCCT |
| | | | (SEQ ID NO: 421) |
| EMX1 T8 | OT-2 | 3 | AAAATTGAGTAATTTTCCCT |
| | | | (SEQ ID NO: 422) |
| EMX1 T8 | OT-3 | 3 | AAAATTGACCAATTCTACCC |
| | | | (SEQ ID NO: 423) |
| EMX1_T8 | OT-4 | 3 | ACAGTTGAGCATTCTACCCT |
| | | | (SEQ ID NO: 424) |
| EMX1_T8 | OT-5 | 3 | AAAGTTAGCAACTCTACCCT |
| | | | (SEQ ID NO: 425) |
| EMX1 T8 | OT-6 | 3 | AAAAATAAGCAATCTGCCCT |
| | | | (SEQ ID NO: 426) |
| EMX1_T8 | OT-7 | 3 | AATAATTGGCAATCTACTCT |
| | | | (SEQ ID NO: 427) |
| VEGFA_T1 | OT-0 | 2 | GGGGGTGACCGCCGGAGCGC |
| | | | (SEQ ID NO: 428) |
| VEGFA_T1 | OT-1 | 3 | TGGGGGAGCCGCCCGGAGCG |
| | | | (SEQ ID NO: 429) |
| VEGFA_T1 | OT-2 | 3 | TGGAGGTGACCGCCTGGGCG |
| | | | (SEQ ID NO: 430) |
| VEGFA T1 | OT-3 | 3 | TGGGGGTGACAGCTGGTGCG |
| | | | (SEQ ID NO: 431) |
| VEGFA T1 | OT-4 | 4 | TGGGGGTGGCAGCTGGACCG |
| | | | (SEQ ID NO: 432) |
| VEGFA T1 | OT-5 | 4 | TGCGGGTGTCCGCCTGGACG |
| | | | (SEQ ID NO: 433) |
| VEGFA_T1 | OT-6 | 4 | TTGGGGTGACAGCCGGCGGG |
| | | | (SEQ ID NO: 434) |
| VEGFA T1 | OT-7 | 4 | TTGGGGTGACCACAGGAGCA |
| | | | (SEQ ID NO: 435) |
| VEGFA T2 | OT-0 | 2 | ATCCTCCACCAGTCATGGTG |
| | | | (SEQ ID NO: 436) |
| VEGFA_T2 | OT-1 | 3 | AATCCTCCCACAGTCCTGGT |
| | | | (SEQ ID NO: 437) |
| VEGFA_T2 | OT-2 | 3 | ATCCATCCACCAGCCATGGT |
| | | | (SEQ ID NO: 438) |
| VEGFA_T2 | OT-3 | 3 | AATCCTCCAACAGCCCTGGT |
| | | | (SEQ ID NO: 439) |
| VEGFA_T2 | OT-4 | 3 | AATCTTCCACACAGTCTGGT |
| | | | (SEQ ID NO: 440) |
| VEGFA_T2 | OT-5 | 3 | AATCCTCCACCTGTCTTGGC |
| | | | (SEQ ID NO: 441) |
| VEGFA_T2 | OT-6 | 3 | AATCCATCCACCATTCATGG |
| | | | (SEQ ID NO: 442) |
| VEGFA_T2 | OT-7 | 3 | AAGTCCTCACCAGTCATTGT |
| | | | (SEQ ID NO: 443) |
| VEGFA_T3 | OT-0 | 2 | TTGACATTGTCCACACCTGG |
| | | | (SEQ ID NO: 444) |
| VEGFA_T3 | OT-1 | 2 | GTTGACATTGACCACAGCTG |
| | | | (SEQ ID NO: 445) |
| VEGFA_T3 | OT-2 | 3 | GTTGACATGTCCAGCAGCTG |
| | | | (SEQ ID NO: 446) |
| VEGFA_T3 | OT-3 | 3 | GTGACACTTATCCACACCTG |
| | | | (SEQ ID NO: 447) |
| VEGFA_T3 | OT-4 | 3 | GTTGACTATTTTCCAACCTG |
| | | | (SEQ ID NO: 448) |
| VEGFA_T3 | OT-5 | 3 | TTTAACATTTTCCACACCTG |
| | | | (SEQ ID NO: 449) |
| VEGFA_T3 | OT-6 | 3 | GTTGACATTGCCCAGATCTG |
| | | | (SEQ ID NO: 450) |
| VEGFA_T3 | OT-7 | 3 | GAAAACATTGTCCACACCTG |
| | | | (SEQ ID NO: 451) |
| VEGFA_T4 | OT-0 | 2 | TGAAATCTAGTGAGGCTCTG |
| | | | (SEQ ID NO: 452) |
| VEGFA_T4 | OT-1 | 2 | GGAAATCCAGTGAGGCTCTG |
| | | | (SEQ ID NO: 453) |
| VEGFA_T4 | OT-2 | 2 | TGAAATCTAGTGAGGCTCTG |
| | | | (SEQ ID NO: 454) |
| VEGFA_T4 | OT-3 | 2 | GAAATCTATTGAGGCTCTGG |
| | | | (SEQ ID NO: 455) |
| VEGFA_T4 | OT-4 | 3 | AAAAATCTATTGAGGCTGTG |
| | | | (SEQ ID NO: 456) |
| VEGFA_T4 | OT-5 | 3 | GGATATCTATTAGTGCTCTG |
| | | | (SEQ ID NO: 457) |
| VEGFA_T4 | OT-6 | 3 | GGAAATATTTAGAGGCTCTG |
| | | | (SEQ ID NO: 458) |
| VEGFA_T4 | OT-7 | 3 | TGAAATCTAGTGGGGCTCTG |
| | | | (SEQ ID NO: 459) |
| VEGFA_T5 | OT-0 | 2 | TAAACTCTCCATGGACCAGG |
| | | | (SEQ ID NO: 460) |
| VEGFA_T5 | OT-1 | 3 | TTAAAATCTCCATGACCATG |
| | | | (SEQ ID NO: 461) |
| VEGFA_T5 | OT-2 | 3 | TTAATCTCTCCATGGAGCAC |
| | | | (SEQ ID NO: 462) |
| VEGFA_T5 | OT-3 | 3 | TTAAACTCTCTCATGGATCA |
| | | | (SEQ ID NO: 463) |
| VEGFA_T5 | OT-4 | 3 | GTTAAACTCTGCATGGACAG |
| | | | (SEQ ID NO: 464) |
| VEGFA_T5 | OT-5 | 3 | GTAAACTCTCCCTTGACCAG |
| | | | (SEQ ID NO: 465) |
| VEGFA_T5 | OT-6 | 3 | TTAAATCTCCATGAGACAAG |
| | | | (SEQ ID NO: 466) |
| VEGFA_T5 | OT-7 | 3 | TTAAACTCTACAGGACCAAG |
| | | | (SEQ ID NO: 467) |
| VEGFA_T6 | OT-0 | 2 | GCCCATGCTGGGGAACAAGG |
| | | | (SEQ ID NO: 468) |
| VEGFA_T6 | OT-1 | 2 | CCCATACTGGGGACCAAGGA |
| | | | (SEQ ID NO: 469) |
| VEGFA_T6 | OT-2 | 2 | GTCCATACTGGGAACCAAGG |
| | | | (SEQ ID NO: 470) |
| VEGFA_T6 | OT-3 | 3 | GCCCATGACAGGGGCCAAGG |
| | | | (SEQ ID NO: 471) |
| VEGFA_T6 | OT-4 | 3 | CCACAGACTGGGGACCAAGG |
| | | | (SEQ ID NO: 472) |
| VEGFA_T6 | OT-5 | 3 | GCCCATACTCGGGGACCTGG |
| | | | (SEQ ID NO: 473) |
| VEGFA_T6 | OT-6 | 3 | TCCCATAGTGGAGACCAAGG |
| | | | (SEQ ID NO: 474) |
| VEGFA_T6 | OT-7 | 3 | TACCATACTGGGGACCCAGG |
| | | | (SEQ ID NO: 475) |
| VEGFA_T7 | OT-0 | 2 | CCGTAACCCTTCGTGGGTAG |
| | | | (SEQ ID NO: 476) |
| VEGFA_T7 | OT-1 | 3 | GCTGTAATCCCTCGTGGGTA |
| | | | (SEQ ID NO: 477) |
| VEGFA_T7 | OT-2 | 3 | GCCTAACCCTGTTGTGGGTA |
| | | | (SEQ ID NO: 478) |
| VEGFA_T7 | OT-3 | 3 | GCCTAACCCTATCGTGGTTA |
| | | | (SEQ ID NO: 479) |
| VEGFA_T7 | OT-4 | 4 | GACGGAATCCTTCGTGAGTA |
| | | | (SEQ ID NO: 480) |
| VEGFA_T7 | OT-5 | 4 | GCCGTAAGCCCTTCGAGGTC |
| | | | (SEQ ID NO: 481) |
| VEGFA_T7 | OT-6 | 4 | GCGCAAAACCCTTCGTGGGT |
| | | | (SEQ ID NO: 482) |
| VEGFA T7 | OT-7 | 4 | GCCATAACCCTACGGGGTGA |
| | | | (SEQ ID NO: 483) |
| VEGFA_T8 | OT-0 | 2 | GCTCTCGTGGGGGTGGGTCA |
| | | | (SEQ ID NO: 484) |
| VEGFA_T8 | OT-1 | 2 | AGCTCTGTGGGGGTGGGATC |
| | | | (SEQ ID NO: 485) |
| VEGFA_T8 | OT-2 | 3 | GGCTCTCATGGGGGTGTGTC |
| | | | (SEQ ID NO: 486) |
| VEGFA_T8 | OT-3 | 3 | AGCCTGGTGGGGGTGAGGTC |
| | | | (SEQ ID NO: 487) |
| VEGFA_T8 | OT-4 | 3 | AGGCTCCGTGGGTGTGGGTC |
| | | | (SEQ ID NO: 488) |
| VEGFA_T8 | OT-5 | 3 | AGCTCTGTGGGGGTGAGGGC |
| | | | (SEQ ID NO: 489) |
| VEGFA_T8 | OT-6 | 3 | GGCTCTGTGGGGGTGGGATC |
| | | | (SEQ ID NO: 490) |
| VEGFA_T8 | OT-7 | 3 | AGCTCTCGGGGGGTGTGGGC |
| | | | (SEQ ID NO: 491) |

[0995] RNA guide sequences corresponding to each target site, as shown in Table 24, were prepared as described in Example 11. HEK293T cells were plated into wells of a 96-well plate, and each well was transfected with a Cas12i2 plasmid and an RNA guide sequence, as described in Example 11.

[0996] Samples were collected and prepared for NGS as described in Example 11. Primer3 software was used to identify primer pairs for each non-target site, centering the non-target sequence within a 120-140 base pair amplicon for targeted amplicon sequencing in edited and negative control (effector only) samples. NGS analysis of the on-target amplicons, non-target amplicons, and unedited control samples was then completed. To minimize technical variation, input material for each on-target and all non-targets corresponding to that on-target was taken from the same harvested well. Background corrected non-target activity rates were generated using maximum likelihood estimation (MLE), which estimates the non-target indel level for a sample given the indel level of its paired negative control sample.

[0997] On-target editing was defined by an indel level above background (>0.5% in this assay) at a target sequence. Off-target editing was defined by an indel level above background (>0.2% after MLE correction in this assay) at one or more of the corresponding non-target sequences. Indel levels for each on-target sequence and non-target sequence were calculated for the variant Cas12i2 binary complexes.

[0998] FIG. 14A, FIG. 14B, and FIG. 14C show on-target indel percentages on the AAVS1, EMX1, and VEGFA loci of Table 24 using the Cas12i2 variant of SEQ ID NO: 3, Cas12i2 variant of SEQ ID NO: 4, and Cas12i2 variant of SEQ ID NO: 5, respectively. FIG. 14A, FIG. 14B, and FIG. 14C further show indel percentages on the non-target loci of Table 25. Some off-target enzymatic activity by each of the Cas12i2 variants was observed at various non-target loci, such as at non-target loci corresponding to AAVS1_T5 (edit distance of 2 and/or 3) and VEGFA_T6 (edit distance of 2). However, overall, minimal off-target activity was observed across each of the non-target loci, and enzymatic activity at off-target loci corresponding to particular on-target loci (e.g., AAVS1_T4, AAVS1_T7, AAVS1_T8, EMX1_T1, EMX1_T2, EMX1_T3, EMX1_T5, EMX1_T6, EMX1_T7, VEGFA_T4, VEGFA_T5, VEGFA_T7, and VEGFA_T8) was determined to be absent or negligible. Therefore, each of the Cas12i2 variants exhibited higher on-target activity than off-target activity at multiple loci.

[0999] These methods are repeated with wild-type Cas12i2 binary complexes (e.g., parent binary complexes). A variant Cas12i2 binary complex having decreased enzymatic activity at a non-target locus exhibits lower indel percentages at a non-target locus compared to a parent binary complex. A variant Cas12i2 binary complex having increased enzymatic activity at an on-target locus exhibits higher indel percentages at the target locus compared to a parent binary complex. Therefore, this Example shows how enzymatic activity of wild-type Cas12i2 and variant Cas12i2 at on-target and non-target loci can be measured and compared.

### Example 15—Determination of Off-Target Binding Activity by Cas12i2 Variants

[1000] This Example describes methods for assessing and comparing binding of a Cas12i2 (wild-type and variant Cas12i2) binary complex to on-target and non-target sequences.

[1001] dsDNA substrates corresponding to the on-target sequences and non-target sequences from Example 14 are generated and labeled as described in Example 7. Cas12i2 RNPs targeting each of the on-target sequences of Example 14 are then prepared according to the method of Example 7. Apo reactions (Cas12i2 without RNA guide) are prepared in the same manner, making up the volume of RNA guide with H₂O.

[1002] Each RNP or Apo sample is separately incubated with an on-target dsDNA substrate and a non-target dsDNA substrate for 1 hour at 37° C. as described in Example 7. Bromophenol blue is added to the reactions, which are then loaded onto a 6% DNA Retardation Gel (Thermofisher), and the gel is imaged on a Licor Odyssey CLx.

[1003] In this assay, the rate at which DNA migrates through the gel is determined by its size. A DNA only sample is able to migrate a particular distance. However, if an RNP binds to the DNA, a band that represents a larger, less mobile DNA complex appears, which is “upshifted” on the gel. Therefore, the “unbound dsDNA” and the “bound dsDNA” bands in the gel are identified for each RNP, wherein the “bound dsDNA” migrate less than the “unbound dsDNA.”

[1004] A variant Cas12i2 RNP having increased on-target binding exhibits increased binding to a dsDNA target sequence, as evidenced by a more intense upshifted band compared to a parent RNP. A variant Cas12i2 RNP having decreased non-target binding exhibits decreased binding to a dsDNA non-target sequence, as evidenced by a less intense or missing upshifted band compared to a parent RNP.

[1005] Therefore, this Example shows how binding activity of wild-type Cas12i2 and variant Cas12i2 binary complexes on on-target and non-target substrates can be measured and compared.

### Example 16—Methods for Determination of Variant Cas12i2 Off-Target Cleavage Sites

[1006] In this Example, a modified version of the tagmentation-based tag integration site sequencing (TTISS) method described in Schmid-Burgk et al., Technology 78(4): 794-800 (2000) was used to analyze Cas12i2 variant specificity and activity. A schematic of the method described herein is shown in FIG. 15. The TTISS donor oligonucleotides and primers in Table XX were synthesized by Integrated DNA Technologies (Coralville, IA). “/5phos/” indicates a 5′ phosphorylation site, “3ddC/” indicates a 3′ dideoxycytidine, and “*” indicates a phosphorothioate linkage.

TABLE 26
TTISS method sequences.

| | |
|---|---|
| Donor_Sense | /5phos/G*T*TGTGAGCAAGGGCGAGGAGGATAACGCCTCTCTCCCA |
| | GCGACT*A*T (SEQ ID NO: 513) |
| Donor_Antisense | /5phos/A*T*AGTCGCTGGGAGAGAGGCGTTATCCTCCTCGCCCTTG |
| | CTCACA*A*C (SEQ ID NO: 514) |
| Transposon_ME | /5Phos/CTGTCTCTTATACA/3ddC/ (SEQ ID NO: 515) |
| Transposon_Read_2 | GTCTCGTGGGCTCGGAGATGTGTATAAGAGACAG (SEQ ID NO: |
| | 516) |
| PCR_Fwd_1 | GTCGCTGGGAGAGAGGCGTTATC (SEQ ID NO: 517) |
| Read_2_Priming_ | GTCTCGTGGGCTCGGAGATGTGT (SEQ ID NO: 518) |
| Sequence | |
| PCR2_ | AATGATACGGCGACCACCGAGATCTACACTATAGCCTACACTCTTTCC |
| StaggeredPrimer1 | CTACACGACGCTCTTCCGATCTTTATCCTCCTCGCCCTTGCTCAC |
| | (SEQ ID NO: 519) |
| PCR2_ | AATGATACGGCGACCACCGAGATCTACACTATAGCCTACACTCTTTCC |
| StaggeredPrimer2 | CTACACGACGCTCTTCCGATCTGTTATCCTCCTCGCCCTTGCTCA |
| | (SEQ ID NO: 520) |
| PCR2_ | AATGATACGGCGACCACCGAGATCTACACTATAGCCTACACTCTTTCC |
| StaggeredPrimer3 | CTACACGACGCTCTTCCGATCTCGTTATCCTCCTCGCCCTTGCTC |
| | (SEQ ID NO: 521) |
| PCR2_ | AATGATACGGCGACCACCGAGATCTACACTATAGCCTACACTCTTTCC |
| StaggeredPrimer4 | CTACACGACGCTCTTCCGATCTGCGTTATCCTCCTCGCCCTTGCT |
| | (SEQ ID NO: 522) |
| PCR2_ | AATGATACGGCGACCACCGAGATCTACACTATAGCCTACACTCTTTCC |
| StaggeredPrimer5 | CTACACGACGCTCTTCCGATCTGGCGTTATCCTCCTCGCCCTTGC |
| | (SEQ ID NO: 523) |
| PCR2_ | AATGATACGGCGACCACCGAGATCTACACTATAGCCTACACTCTTTCC |
| StaggeredPrimer6 | CTACACGACGCTCTTCCGATCTAGGCGTTATCCTCCTCGCCCTTG |
| | (SEQ ID NO: 524) |
| PCR2_ | AATGATACGGCGACCACCGAGATCTACACTATAGCCTACACTCTTTCC |
| StaggeredPrimer7 | CTACACGACGCTCTTCCGATCTGAGGCGTTATCCTCCTCGCCCTT |
| | (SEQ ID NO: 525) |
| PCR2_ | AATGATACGGCGACCACCGAGATCTACACTATAGCCTACACTCTTTCC |
| StaggeredPrimer8 | CTACACGACGCTCTTCCGATCTAGAGGCGTTATCCTCCTCGCCCT |
| | (SEQ ID NO: 526) |
| PCR2_ | AATGATACGGCGACCACCGAGATCTACACTATAGCCTACACTCTTTCC |
| StaggeredPrimer9 | CTACACGACGCTCTTCCGATCTGAGAGGCGTTATCCTCCTCGCCC |
| | (SEQ ID NO: 527) |
| PCR2_ | AATGATACGGCGACCACCGAGATCTACACTATAGCCTACACTCTTTCC |
| StaggeredPrimer10 | CTACACGACGCTCTTCCGATCTAGAGAGGCGTTATCCTCCTCGCC |
| | (SEQ ID NO: 528) |
| PCR2_ | AATGATACGGCGACCACCGAGATCTACACTATAGCCTACACTCTTTCC |
| StaggeredPrimer11 | CTACACGACGCTCTTCCGATCTGAGAGAGGCGTTATCCTCCTCGC |
| | (SEQ ID NO: 529) |
| PCR2_ | AATGATACGGCGACCACCGAGATCTACACTATAGCCTACACTCTTTCC |
| StaggeredPrimer12 | CTACACGACGCTCTTCCGATCTGGAGAGAGGCGTTATCCTCCTCG |
| | (SEQ ID NO: 530) |
| PCR_rev_BC1 | CAAGCAGAAGACGGCATACGAGATCGAGTAATGTCTCGTGGGCTCGGA |
| | GATGTGT (SEQ ID NO: 531) |
| PCR_rev_BC2 | CAAGCAGAAGACGGCATACGAGATTCTCCGGAGTCTCGTGGGCTCGGA |
| | GATGIGT (SEQ ID NO: 532) |
| PCR_rev_BC3 | CAAGCAGAAGACGGCATACGAGATAATGAGCGGTCTCGTGGGCTCGGA |
| | GATGIGT (SEQ ID NO: 533) |
| PCR_rev_BC4 | CAAGCAGAAGACGGCATACGAGATGGAATCTCGTCTCGTGGGCTCGGA |
| | GATGIGT (SEQ ID NO: 534) |
| PCR_rev_BC5 | CAAGCAGAAGACGGCATACGAGATTTCTGAATGTCTCGTGGGCTCGGA |
| | GATGIGT (SEQ ID NO: 535) |
| PCR_rev_BC6 | CAAGCAGAAGACGGCATACGAGATACGAATTCGTCTCGTGGGCTCGGA |
| | GATGIGT (SEQ ID NO: 536) |
| PCR_rev_BC7 | CAAGCAGAAGACGGCATACGAGATAGCTTCAGGTCTCGTGGGCTCGGA |
| | GATGTGT (SEQ ID NO: 537) |
| PCR_rev_BC8 | CAAGCAGAAGACGGCATACGAGATGCGCATTAGTCTCGTGGGCTCGGA |
| | GATGTGT (SEQ ID NO: 538) |
| PCR_rev_BC9 | CAAGCAGAAGACGGCATACGAGATCATAGCCGGTCTCGTGGGCTCGGA |
| | GATGIGT (SEQ ID NO: 539) |
| PCR_rev_BC10 | CAAGCAGAAGACGGCATACGAGATTTCGCGGAGTCTCGTGGGCTCGGA |
| | GATGTGT (SEQ ID NO: 540) |
| PCR_rev_BC11 | CAAGCAGAAGACGGCATACGAGATGCGCGAGAGTCTCGTGGGCTCGGA |
| | GATGTGT (SEQ ID NO: 541) |
| PCR_rev_BC12 | CAAGCAGAAGACGGCATACGAGATCTATCGCTGTCTCGTGGGCTCGGA |
| | GATGIGT (SEQ ID NO: 542) |
| PCR rev_BC13 | CAAGCAGAAGACGGCATACGAGATTGTAGTGCGTCTCGTGGGCTCGGA |
| | GATGIGT (SEQ ID NO: 543) |
| PCR_rev_BC14 | CAAGCAGAAGACGGCATACGAGATGCGTCGACGTCTCGTGGGCTCGGA |
| | GATGTGT (SEQ ID NO: 544) |
| PCR_rev_BC15 | CAAGCAGAAGACGGCATACGAGATGGTCTTCTGTCTCGTGGGCTCGGA |
| | GATGIGT (SEQ ID NO: 545) |
| PCR_rev_BC16 | CAAGCAGAAGACGGCATACGAGATAAATGTCCGTCTCGTGGGCTCGGA |
| | GATGIGT (SEQ ID NO: 546) |
| PCR_rev_BC17 | CAAGCAGAAGACGGCATACGAGATGTTGAAACGTCTCGTGGGCTCGGA |
| | GATGIGT (SEQ ID NO: 547) |
| PCR_rev_BC18 | CAAGCAGAAGACGGCATACGAGATTCTTTACGGTCTCGTGGGCTCGGA |
| | GATGIGT (SEQ ID NO: 548) |
| PCR_rev_BC19 | CAAGCAGAAGACGGCATACGAGATATGCCTGGGTCTCGTGGGCTCGGA |
| | GATGIGT (SEQ ID NO: 549) |
| PCR_rev_BC20 | CAAGCAGAAGACGGCATACGAGATCAATAAGGGTCTCGTGGGCTCGGA |
| | GATGIGT (SEQ ID NO: 550) |
| PCR_rev_BC21 | CAAGCAGAAGACGGCATACGAGATCGCCGTAAGTCTCGTGGGCTCGGA |
| | GATGTGT (SEQ ID NO: 551) |
| PCR rev_BC22 | CAAGCAGAAGACGGCATACGAGATTAAGGCTTGTCTCGTGGGCTCGGA |
| | GATGIGT (SEQ ID NO: 552) |
| PCR_rev_BC23 | CAAGCAGAAGACGGCATACGAGATTTGCTGCCGTCTCGTGGGCTCGGA |
| | GATGTGT (SEQ ID NO: 553) |
| PCR_rev_BC24 | CAAGCAGAAGACGGCATACGAGATCTCAATGTGTCTCGTGGGCTCGGA |
| | GATGTGT (SEQ ID NO: 554) |

[1007] PCR_fwd_2_stagger_mix (1 μM) was prepared by adding equal volumes of PCR2_StaggeredPrimer1 through PCR2_Staggeredprimer12 and diluting 10-fold in 10 mM Tris-HCl.

[1008] Double-stranded TTISS donor oligos were prepared by mixing equimolar amounts of Donor_Sense and Donor_Antisense oligos and mixing 45 μL of the equimolar mixture with 5 μL of IDT duplex buffer (Integrated DNA Technologies) in a 96-well PCR plate. Oligos were then duplexed by placing the plate in a thermal cycler and running a program to heat samples to 95° C. and subsequently ramp temperature to 25° C. by running 700 6-second cycles in which the temperature decreased by 0.1° C. for each cycle.

[1009] Transposon DNA was prepared by combining 332 μL each of 100 μM Transposon_ME and 100 μM of Transposon_Read_2 oligos with 80 μL of 10× annealing buffer (300 mM NaCl, 1.5 mM EDTA, 15 mM HCl), and 40 μL of Ultrapure Water (Invitrogen). The mixture was distributed across 8 wells of a 96-well PCR plate. The transposon DNA was annealed by placing the PCR plate in a thermal cycler and running a program to heat samples to 95° C. for 3 minutes and subsequently ramp temperature to 25° C. by running 700 6-second cycles in which the temperature decreased by 0.1° C. for each cycle.

[1010] Upon completion of the annealing step, transposon DNA was then diluted to 100 ng/μL. Next, 375 μL 100 ng/μL transposon DNA was mixed with 375 μL glycerol and 750 μL EZ-Tn5 Transposase (Lucigen). The solutions were then mixed by vortexing and incubated at room temperature for 30 minutes to form the loaded Tn5 transposome. Transposome was stored at −20° C. until ready for use.

[1011] Prior to transfection, HEK 293T cells were plated in 24-well plates (Corning) at a density of 125,000 cells per well in 500 μL D10 media (DMEM containing GlutaMax and pyruvate (Gibco) supplemented with 10% Premium Heat-inactivated FBS (Corning) and Penicillin/Streptomycin antibiotic (Hyclone)). Cells were cultured overnight in an incubator set to 37° C. and 5% CO₂.

[1012] Cells were transfected approximately 15 hours after plating. For each well to be transfected, 500 ng donor oligo at ˜1.25 ng/μL, 375 ng Cas12i2 effector plasmid (Cas12i2 variant of SEQ ID NO: 4) at 1000 ng/μL, and 125 ng RNA guide plasmid at 100 ng/μL were added to Opti-MEM media (Gibco) to a final volume of 125 μL to form Opti-1 solution. The RNA guide and target sequences are shown in Table 27; SpCas9 was used as a control. In a separate vessel, 122.5 μL Opti-MEM media was mixed with 2.5 μL GeneJuice transfection reagent (Millipore-Sigma) to form Opti-2 solution. Opti-2 solution was incubated at room temperature for 5 minutes. After the Opti-2 incubation, Opti-1 and Opti-2 were mixed together and incubated at room temperature for 5-15 minutes. After incubation, the Opti-1+Opti-2 solution was added dropwise to a single well of a 24-well plate. Cells were returned to the incubator for approximately 72 h.

TABLE 27
Target and crRNA sequences for TTISS.

| Target Locus | Target | crRNA | Effector |
|---|---|---|---|
| AAVS1_T1 | TGTCCCCCCAAGTTTTGG | AGAAATCCGTCTTTCATTGACGGTGT | Variant |
| | AC | CCCCCCAAGTTTTGGAC (SEQ ID | Cas12i2 |
| | (SEQ ID NO: 252) | NO: 253) | |
| AAVS1_T3 | GTGAGAATGGTGCGTCCT | AGAAATCCGTCTTTCATTGACGGGTG | Variant |
| | AG | AGAATGGTGCGTCCTAG (SEQ ID | Cas12i2 |
| | (SEQ ID NO: 256) | NO: 257) | |
| AAVS1_T5 | AACTGGCCCTGGCTTTGG | AGAAATCCGTCTTTCATTGACGGAAC | Variant |
| | CA | TGGCCCTGGCTTTGGCA (SEQ ID | Cas12i2 |
| | (SEQ ID NO: 260) | NO: 261) | |
| AAVS1_T6 | GTAGCCTCTCCCGCTCTG | AGAAATCCGTCTTTCATTGACGGGTA | Variant |
| | GT | GCCTCTCCCGCTCTGGT (SEQ ID | Cas12i2 |
| | (SEQ ID NO: 262) | NO: 263) | |
| AAVS1_T7 | GGGAAGTGGTTGGTCAGC | AGAAATCCGTCTTTCATTGACGGGGG | Variant |
| | AT | AAGTGGTTGGTCAGCAT (SEQ ID | Cas12i2 |
| | (SEQ ID NO: 264) | NO: 265) | |
| AAVS1_T8 | AGCGGGTATGGGAAGGGC | AGAAATCCGTCTTTCATTGACGGAGC | Variant |
| | TT | GGGTATGGGAAGGGCTT (SEQ ID | Cas12i2 |
| | (SEQ ID NO: 266) | NO: 267) | |
| EMX1_T1 | GGGCGCAGGGCCACCTGG | AGAAATCCGTCTTTCATTGACGGGGG | Variant |
| | AC | CGCAGGGCCACCTGGAC (SEQ ID | Cas12i2 |
| | (SEQ ID NO: 268) | NO: 269) | |
| EMX1 T2 | GGATGGCGACTTCAGGCA | AGAAATCCGTCTTTCATTGACGGGGA | Variant |
| | CA | TGGCGACTTCAGGCACA (SEQ ID | Cas12i2 |
| | (SEQ ID NO: 270) | NO: 271) | |
| EMX1_T4 | GGGGAGGCCTGGAGTCAT | AGAAATCCGTCTTTCATTGACGGGGG | Variant |
| | GG | GAGGCCTGGAGTCATGG (SEQ ID | Cas12i2 |
| | (SEQ ID NO: 274) | NO: 275) | |
| EMX1_T6 | GAGCCAGTGTTGCTAGTC | AGAAATCCGTCTTTCATTGACGGGAG | Variant |
| | AA | CCAGTGTTGCTAGTCAA (SEQ ID | Cas12i2 |
| | (SEQ ID NO: 278) | NO: 279) | |
| EMX1 T7 | AGCAAGGGACTATTCAGG | AGAAATCCGTCTTTCATTGACGGAGC | Variant |
| | GA | AAGGGACTATTCAGGGA (SEQ ID | Cas12i2 |
| | (SEQ ID NO: 280) | NO: 281) | |
| EMX1_T8 | AAAATTGAGCAATCTACC | AGAAATCCGTCTTTCATTGACGGAAA | Variant |
| | CT | ATTGAGCAATCTACCCT (SEQ ID | Cas12i2 |
| | (SEQ ID NO: 282) | NO: 283) | |
| VEGFA_T1 | TGGGGGTGACCGCCGGAG | AGAAATCCGTCTTTCATTGACGGTGG | Variant |
| | CG | GGGTGACCGCCGGAGCG (SEQ ID | Cas12i2 |
| | (SEQ ID NO: 284) | NO: 285) | |
| VEGFA_T2 | AATCCTCCACCAGTCATG | AGAAATCCGTCTTTCATTGACGGAAT | Variant |
| | GT | CCTCCACCAGTCATGGT (SEQ ID | Cas12i2 |
| | (SEQ ID NO: 286) | NO: 287) | |
| VEGFA_T3 | GTTGACATTGTCCACACC | AGAAATCCGTCTTTCATTGACGGGTT | Variant |
| | TG | GACATTGTCCACACCTG (SEQ ID | Cas12i2 |
| | (SEQ ID NO: 288) | NO: 289) | |
| VEGFA_T5 | TTAAACTCTCCATGGACC | AGAAATCCGTCTTTCATTGACGGTTA | Variant |
| | AG | AACTCTCCATGGACCAG (SEQ ID | Cas12i2 |
| | (SEQ ID NO: 292) | NO: 293) | |
| VEGFA_T6 | GCCCATACTGGGGACCAA | AGAAATCCGTCTTTCATTGACGGGCC | Variant |
| | GG | CATACTGGGGACCAAGG (SEQ ID | Cas12i2 |
| | (SEQ ID NO: 294) | NO: 295) | |
| VEGFA_T7 | GCCGTAACCCTTCGTGGG | AGAAATCCGTCTTTCATTGACGGGCC | Variant |
| | TA | GTAACCCTTCGTGGGTA (SEQ ID | Cas12i2 |
| | (SEQ ID NO: 296) | NO: 297) | |
| AAVS1_T1 | GCTTTTGTCCCCCCAAGT | GCTTTTGTCCCCCCAAGTTTGTTTTA | SpCas9 |
| | TT (SEQ ID NO: | GAGCTAGAAATAGCAAGTTAAAATAA | |
| | 555) | GGCTAGTCCGTTATCAACTTGAAAAA | |
| | | GTGGCACCGAGTCGGTGC (SEQ ID | |
| | | NO: 556) | |
| AAVS1_T3 | TTGTGAGAATGGTGCGTC | TTGTGAGAATGGTGCGTCCTGTTTTA | SpCas9 |
| | CT (SEQ ID NO: | GAGCTAGAAATAGCAAGTTAAAATAA | |
| | 557) | GGCTAGTCCGTTATCAACTTGAAAAA | |
| | | GTGGCACCGAGTCGGTGC (SEQ ID | |
| | | NO: 558) | |
| AAVS1_T5 | GCTTTAACTGGCCCTGGC | GCTTTAACTGGCCCTGGCTTGTTTTA | SpCas9 |
| | TT (SEQ ID NO: | GAGCTAGAAATAGCAAGTTAAAATAA | |
| | 559) | GGCTAGTCCGTTATCAACTTGAAAAA | |
| | | GTGGCACCGAGTCGGTGC (SEQ ID | |
| | | NO: 560) | |
| AAVS1_T6 | CTTTGTAGCCTCTCCCGC | CTTTGTAGCCTCTCCCGCTCGTTTTA | SpCas9 |
| | TC (SEQ ID NO: | GAGCTAGAAATAGCAAGTTAAAATAA | |
| | 561) | GGCTAGTCCGTTATCAACTTGAAAAA | |
| | | GTGGCACCGAGTCGGTGC (SEQ ID | |
| | | NO: 562) | |
| AAVS1_T7 | TGGGAAGTGGTTGGTCAG | TGGGAAGTGGTTGGTCAGCAGTTTTA | SpCas9 |
| | CA (SEQ ID NO: | GAGCTAGAAATAGCAAGTTAAAATAA | |
| | 563) | GGCTAGTCCGTTATCAACTTGAAAAA | |
| | | GTGGCACCGAGTCGGTGC (SEQ ID | |
| | | NO: 564) | |
| AAVS1_T8 | GACTTTAGCGGGTATGGG | GACTTTAGCGGGTATGGGAAGTTTTA | SpCas9 |
| | AA (SEQ ID NO: | GAGCTAGAAATAGCAAGTTAAAATAA | |
| | 565) | GGCTAGTCCGTTATCAACTTGAAAAA | |
| | | GTGGCACCGAGTCGGTGC (SEQ ID | |
| | | NO: 566) | |
| EMX1_T1 | TCTTTGGGCGCAGGGCCA | TCTTTGGGCGCAGGGCCACCGTTTTA | SpCas9 |
| | CC (SEQ ID NO: | GAGCTAGAAATAGCAAGTTAAAATAA | |
| | 567) | GGCTAGTCCGTTATCAACTTGAAAAA | |
| | | GTGGCACCGAGTCGGTGC (SEQ ID | |
| | | NO: 568) | |
| EMX1_T2 | TGGATGGCGACTTCAGGC | TGGATGGCGACTTCAGGCACGTTTTA | SpCas9 |
| | AC (SEQ ID NO: | GAGCTAGAAATAGCAAGTTAAAATAA | |
| | 569) | GGCTAGTCCGTTATCAACTTGAAAAA | |
| | | GTGGCACCGAGTCGGTGC (SEQ ID | |
| | | NO: 570) | |
| EMX1_T4 | TTTGGGGAGGCCTGGAGT | TTTGGGGAGGCCTGGAGTCAGTTTTA | SpCas9 |
| | CA (SEQ ID NO: | GAGCTAGAAATAGCAAGTTAAAATAA | |
| | 571) | GGCTAGTCCGTTATCAACTTGAAAAA | |
| | | GTGGCACCGAGTCGGTGC (SEQ ID | |
| | | NO: 572) | |
| EMX1_T6 | GAGCCAGTGTTGCTAGTC | GAGCCAGTGTTGCTAGTCAAGTTTTA | SpCas9 |
| | AA (SEQ ID NO: | GAGCTAGAAATAGCAAGTTAAAATAA | |
| | 573) | GGCTAGTCCGTTATCAACTTGAAAAA | |
| | | GTGGCACCGAGTCGGTGC (SEQ ID | |
| | | NO: 574) | |
| EMX1_T7 | CTTTAGCAAGGGACTATT | CTTTAGCAAGGGACTATTCAGTTTTA | SpCas9 |
| | CA (SEQ ID NO: | GAGCTAGAAATAGCAAGTTAAAATAA | |
| | 575) | GGCTAGTCCGTTATCAACTTGAAAAA | |
| | | GIGGCACCGAGTCGGTGC (SEQ ID | |
| | | NO: 576) | |
| EMX1_T8 | TAAAATTGAGCAATCTAC | TAAAATTGAGCAATCTACCCGTTTTA | SpCas9 |
| | CC (SEQ ID NO: | GAGCTAGAAATAGCAAGTTAAAATAA | |
| | 577) | GGCTAGTCCGTTATCAACTTGAAAAA | |
| | | GTGGCACCGAGTCGGTGC (SEQ ID | |
| | | NO: 578) | |
| VEGFA_T1 | TGGGGGTGACCGCCGGAG | TGGGGGTGACCGCCGGAGCGGTTTTA | SpCas9 |
| | CG (SEQ ID NO: | GAGCTAGAAATAGCAAGTTAAAATAA | |
| | 579) | GGCTAGTCCGTTATCAACTTGAAAAA | |
| | | GTGGCACCGAGTCGGTGC (SEQ ID | |
| | | NO: 580) | |
| VEGFA_T2 | CTTTAATCCTCCACCAGT | CTTTAATCCTCCACCAGTCAGTTTTA | SpCas9 |
| | CA (SEQ ID NO: | GAGCTAGAAATAGCAAGTTAAAATAA | |
| | 581) | GGCTAGTCCGTTATCAACTTGAAAAA | |
| | | GTGGCACCGAGTCGGTGC (SEQ ID | |
| | | NO: 582) | |
| VEGFA_T3 | TTGTTGACATTGTCCACA | TTGTTGACATTGTCCACACCGTTTTA | SpCas9 |
| | CC (SEQ ID NO: | GAGCTAGAAATAGCAAGTTAAAATAA | |
| | 583) | GGCTAGTCCGTTATCAACTTGAAAAA | |
| | | GTGGCACCGAGTCGGTGC (SEQ ID | |
| | | NO: 584) | |
| VEGFA_T5 | TTTTAAACTCTCCATGGA | TTTTAAACTCTCCATGGACCGTTTTA | SpCas9 |
| | CC (SEQ ID NO: | GAGCTAGAAATAGCAAGTTAAAATAA | |
| | 585) | GGCTAGTCCGTTATCAACTTGAAAAA | |
| | | GTGGCACCGAGTCGGTGC (SEQ ID | |
| | | NO: 586) | |
| VEGFA_T6 | TTTGCCCATACTGGGGAC | TTTGCCCATACTGGGGACCAGTTTTA | SpCas9 |
| | CA (SEQ ID NO: | GAGCTAGAAATAGCAAGTTAAAATAA | |
| | 587) | GGCTAGTCCGTTATCAACTTGAAAAA | |
| | | GTGGCACCGAGTCGGTGC (SEQ ID | |
| | | NO: 588) | |
| VEGFA_T7 | GCTTTGCCGTAACCCTTC | GCTTTGCCGTAACCCTTCGTGTTTTA | SpCas9 |
| | GT (SEQ ID NO: | GAGCTAGAAATAGCAAGTTAAAATAA | |
| | 589) | GGCTAGTCCGTTATCAACTTGAAAAA | |
| | | GTGGCACCGAGTCGGTGC (SEQ ID | |
| | | NO: 590) | |

[1013] Cells were then dissociated from the plate by removing media, washing once with 200 μL PBS (Gibco), adding 50 μL of TrypLE dissociation reagent (Gibco), and incubating at 37° C. for 5 minutes. Cells were then resuspended by adding 200 μL of D10 media and mixing well. Resuspended cells were then transferred to a 96-well PCR plate and spun down at 400× g for 10 minutes. The supernatant was removed and cell pellets were stored at −20° C. until DNA extraction.

[1014] DNA was extracted from cells by resuspending pellet in 50 μL lysis buffer (1 mM CaCl2, 3 mM MgCl2, 1 mM EDTA, 1% Triton X-100 (Sigma), 8 U/mL Proteinase K (NEB), 10 mM Tris-HCl) and incubating resuspension at 65° C. for 10 minutes. Next gDNA was purified using the Zymo gDNA clean and concente-5 kit (Zymo Research) following the manufacturer's instructions and eluting in 35 μL of 10 mM Tris-HCl. gDNA was visualized on a gel and quantified by the Qubit high-sensitivity dsDNA kit (Invitrogen) following the manufacturer's instructions. gDNA extracts were then normalized to 50 ng/μL in 10 mM Tris-HCl.

[1015] Genomic DNA was tagmented by first preparing a solution 24 μL transposome, 6 μL EZ-Tn5 10× Reaction Buffer (Lucigen), 24 μL purified and diluted genomic DNA, and 6 μL of water. This solution was mixed well and incubated at 37° C. for two hours. Following the incubation, 6 μL of Ez-Tn5 10× stop solution was mixed into the reaction. The reaction+stop solution mixture was then heated at 70° C. for 10 minutes. The stopped reaction was then purified using the Zymo gDNA clean and concente-5 kit by following the manufacturer's instructions and eluting in 50 μL 10 mM Tris-HCl.

[1016] Round 1 PCR was performed using a KOD HotStart PCR Kit (Millipore Sigma) with the following conditions per reaction: 5 μL 10× Buffer for KOD Hot Start DNA Polymerase, 3 μL 25 mM MgSO4, 5 μL dNTPs (2 mM each), 1.5 μL PCR_fwd_1 (1 μM), 1.5 μL Transposon_Read_2 (1 μM), 1 μL KOD Hot Start DNA Polymerase (1.0 U/μL), 15 μL tagmented and purified gDNA, and 18 μL Ultrapure water. All reagents were mixed well, and the reaction was carried out following the manufacturer's instructions using an annealing temperature of 60° C. and an extension time of 60 seconds.

[1017] Round 2 PCR was performed with the following conditions per reaction: 5 μL 10×Buffer for KOD Hot Start DNA Polymerase, 3 μL 25 mM MgSO4, 5 μL dNTPs (2 mM each), PCR_fwd_2_stagger_mix (10 μM), 1.5 μL of one reverse barcoding primer (PCR_rev_BC1 through PCR_rev_BC24) (1 μM), 1 μL KOD Hot Start DNA Polymerase (1.0 U/μL), 3 μL PCR 1 product, and 30 μL Ultrapure water. All reagents were mixed well, and the reaction was carried out following the manufacturer's instructions using an annealing temperature of 65° C. and an extension time of 60 seconds.

[1018] The 50 μL PCR2 reaction was then purified by a 0.8× SPRI cleanup using Clean-NGS beads (Bulldog Bio). SPRI reaction was eluted in 25 μL 10 mM Tris-HCl. Cleaned reactions were pooled and the pool was loaded onto a 2% E-gel EX (Invitrogen), which was then run for 10 minutes on an E-gel base. The resulting smear was then excised from 250-1000 bp with a razor and the excised library was purified with a Gel Extraction kit (Qiagen) following the manufacturer's instructions and eluting in 50 μL. A second library purification was performed using the Clean and Concentrate-5 kit (Zymo Research) following the manufacturer's instructions and eluting in 20 μL.

[1019] The library was then quantified by the Qubit high-sensitivity dsDNA kit and normalized to 3 nM using an estimated average library size of 400 bp. The normalized library was mixed with 3 nM PhiX (Illumina) so the library:PhiX ratio was 4:1. The final library:PhiX mix was then loaded onto an Illumina NextSeq 550 High-output kit at a final concentration of 2.0 pM. Read lengths were set to 75/8/0/25 R1/I1/I2/R2.

[1020] After sequencing, the TTISS data was analyzed to identify on and off-target sites. The raw sequencing data was first demultiplexed and converted to paired-end fastq files using Illumina's bcl2fastq2 software. Reads that did not begin with the dsODN primer sequence or had low sequencing quality were filtered out, and the remaining reads were truncated to 25 bp of genomic DNA in the forward direction and 15 bp of genomic DNA in the reverse direction. The truncated reads were then aligned to the GRCh38 human reference genome using bowtie2, allowing for a maximum fragment length of 1000 bp (Langmead & Salzberg, Nature Methods 9:357-9 (2012). The alignments were filtered to only include read pairs that mapped properly, and PCR duplicate reads were marked using SAMtools (Li et al., Bioinformatics 35(16): 2078-9 (2009). All 100 bp genomic windows with at least two unique aligned reads were identified as possible integration sites, and for each window, a cut site was predicted based on the frequency and positional distribution of its aligned reads. Each window was then searched for any sequences within an edit distance of 6 from the target sequence(s) used for the sample, and the putative cut site for the sequence was determined. SpCas9 cuts −4 bp from the 3′ end of the target, Cas12i2 cuts 3 bp from the 3′ end of the target. Windows without any putative on/off-target sequences were removed, as were windows where the putative on/off-target sequence's cut site was over 8 bp from the window's predicted cut site. Windows that appeared in negative control samples were also removed to avoid common break sites. The remaining windows, their on/off-target sequence, and relevant metrics such as the count of read aligned to the window and the edit distance between the identified on/off-target and the target sequence were then output.

[1021] Table 28 shows the on-target reads and number of off-targets that were measured for each Cas12i2 and SpCas9 target. “On-target reads” refer to the number of unique reads mapping to 100 bp window around the on-target site. “Number of off-targets” refers to the number of sites in the genome that had at least two unique reads map within a 100 bp window around the site and contained a putative off-target sequence (e.g., a sequence within an edit distance of 6 from the guide sequence and with a predicted cut site within 8 bp of the cut site predicted from the distribution of reads mapping to the site). “Highest off-target reads” refers to the number of reads for the off-target site with the highest number of reads. FIG. 16A, FIG. 16B, FIG. 16C, and FIG. 16D are schematics of on-target and off-target reads for variant Cas12i2 of SEQ ID NO: 4 and SpCas9 at the target EMX1_T2. Each base in a read that corresponds with (e.g., is identical to) the on-target sequence is indicated with a dot, and each base in a read that does not correspond with (e.g., is not identical to) the on-target sequence is indicated with the sequenced base.

TABLE 28
On-target and off-target reads.

| | | | Cas12i2 | | | SpCas9 |
|---|---|---|---|---|---|---|
| | Cas12i2 | Cas12i2 | Highest | SpCas9 | SpCas9 | Highest |
| Target | On-target | Number | off-target | On-target | Number | off-target |
| Locus | reads | off-targets | reads | reads | off-targets | reads |
| AAVS1_T1 | 289 | 0 | 0 | 79 | 0 | 0 |
| AAVS1_T3 | 251 | 1 | 4 | 747 | 1 | 14 |
| AAVS1_T5 | 410 | 1 | 71 | 291 | 1 | 6 |
| AAVS1_T6 | 507 | 2 | 4 | 674 | 1 | 9 |
| AAVS1_T7 | 725 | 2 | 12 | 87 | 1 | 4 |
| AAVS1_T8 | 66 | 1 | 13 | 864 | 1 | 29 |
| EMX1_T1 | 259 | 22 | 14 | 241 | 4 | 119 |
| EMX1_T2 | 860 | 0 | 0 | 787 | 4 | 342 |
| EMX1_T4 | 495 | 23 | 54 | 234 | 81 | 225 |
| EMX1_T6 | 522 | 0 | 0 | 329 | 0 | 0 |
| EMX1_T7 | 357 | 5 | 37 | 171 | 0 | 0 |
| EMX1_T8 | 274 | 3 | 24 | 713 | 2 | 7 |
| VEGFA_T1 | 389 | 4 | 7 | 388 | 5 | 112 |
| VEGFA_T2 | 118 | 1 | 14 | 180 | 2 | 9 |
| VEGFA_T3 | 523 | 0 | 0 | 874 | 0 | 0 |
| VEGFA_T5 | 465 | 0 | 0 | 444 | 0 | 0 |
| VEGFA_T6 | 217 | 2 | 14 | 431 | 4 | 41 |
| VEGFA_T7 | 272 | 0 | 0 | 1215 | 0 | 0 |

[1022] The data in Table 28 and FIG. 16A, FIG. 16B, FIG. 16C, and FIG. 16D show that the variant Cas12i2 of SEQ ID NO: 4 demonstrated significantly fewer off-target reads than on-target reads. In contract, SpCas9 produced several off-targets with high read counts, suggesting that SpCas9 had higher off-target editing efficiency compared to variant Cas12i2. As shown in FIG. 16B, each Cas12i2 read for EMX1_T2 was an on-target read. However, SpCas9 reads showed multiple EMX1_T2 off-target sequences with high read counts. As shown in FIG. 16C, SpCas9 off-target reads exceeded on-target reads for EMX1_T4. See also the “highest off-target read” columns in Table 28. These conclusions are also supported by deep sequencing of select off-target sits where the maximum off-target indel rate was 2.6% for variant Cas12i2 and 77.7% for SpCas9.

[1023] The TTISS method further demonstrated that variant Cas12i2 prefers a 5′-NTTN-3′ PAM sequence. Off-targets identified with non-canonical PAM sequences occurred with low read counts and high edit distances between the guide and off-target, suggesting that those ready were likely false positives instead of true off-target sites.

[1024] This Example shows that variant Cas12i2 of SEQ ID NO: 4 exhibits high on-target selectivity and activity. The off-target binding/activity by SpCas9 exceeds that of variant Cas12i2 of SEQ ID NO: 4.

### Example 17—Targeting of Mammalian Genes by Cas12i2 Variants

[1025] This Example describes indel assessment on multiple targets using wild-type Cas12i2 and Cas12i2 variants introduced into mammalian cells by transient transfection.

[1026] Cas12i2 engineered variants in this Example were cloned into the pcda3.1 backbone (Invitrogen) on top of the previously engineered Cas12i2 variant of SEQ ID NO: 5, which has the following mutations: D581R, 1926R, V1030G, and S1046G. The plasmids were ordered from Genewiz as midi-preps normalized to 1 μg/μL in 10 T buffer. The crRNA sequences, as shown in Table 14, were ordered as circularized plasmid midi-preps and normalized to 100 ng/μL in 10 T buffer.

TABLE 29
crRNA and Target Sequences for
Transient Transfection.

| Target | crRNA sequence | Target Sequence |
|---|---|---|
| AAVS1_T6 | AGAAATCCGTCTTTCATTGACGG | GTAGCCTCTCCCGCTC |
| | GTAGCCTCTCCCGCTCTGGT | TGGT (SEQ ID NO: |
| | (SEQ ID NO: 591) | 592) |
| EMX1 T2 | AGAAATCCGTCTTTCATTGACGG | GGATGGCGACTTCAGG |
| | GGATGGCGACTTCAGGCACA | CACA (SEQ ID NO: |
| | (SEQ ID NO: 593) | 594) |
| EMX1_T6 | AGAAATCCGTCTTTCATTGACGG | GAGCCAGTGTTGCTAG |
| | GAGCCAGTGTTGCTAGTCAA | TCAA |
| | (SEQ ID NO: 595) | (SEQ ID NO: 596) |
| EMX1_T7 | AGAAATCCGTCTTTCATTGACGG | AGCAAGGGACTATTCA |
| | AGCAAGGGACTATTCAGGGA | GGGA (SEQ ID NO: |
| | (SEQ ID NO: 597) | 598) |
| VEGFA_T5 | AGAAATCCGTCTTTCATTGACGG | TTAAACTCTCCATGGA |
| | TTAAACTCTCCATGGACCAG | CCAG (SEQ ID NO: |
| | (SEQ ID NO: 599) | 600) |
| VEGFA T7 | AGAAATCCGTCTTTCATTGACGG | GCCGTAACCCTTCGTG |
| | GCCGTAACCCTTCGTGGGTA | GGTA |
| | (SEQ ID NO: 601) | (SEQ ID NO: 602) |

[1027] Approximately 16-18 hours prior to transfection, 100 μL of 25,000 HEK293T cells in DMEM/10% FBS+Pen/Strep were plated into each well of a 96-well plate. On the day of transfection, the cells were 70-90% confluent. For each well to be transfected, a mixture of 0.5 μL of Lipofectamine 2000 and 9.5 μL of Opti-MEM was prepared and then incubated at room temperature for 5-20 minutes (Solution 1). After incubation, the lipofectamine:OptiMEM mixture was added to a separate mixture containing 182 ng of effector plasmid and 14 ng of crRNA and water up to 10 μL (Solution 2). The solution 1 and solution 2 mixtures were mixed by pipetting up and down and then incubated at room temperature for 25 minutes. Following incubation, 20 μL of the Solution 1 and Solution 2 mixture were added dropwise to each well of a 96 well plate containing the cells. 72 hours post transfection, cells were trypsinized by adding 10 μL of TrypLE to the center of each well and incubated for approximately 5 minutes. 100 μL of D10 media was then added to each well and mixed to resuspend cells. The cells were then spun down at 500 g for 10 minutes, and the supernatant was discarded. QuickExtract buffer was added to ⅕ the amount of the original cell suspension volume. Cells were incubated at 65° C. for 15 minutes, 68° C. for 15 minutes, and 98° C. for 10 minutes.

[1028] Samples for Next Generation Sequencing were prepared by two rounds of PCR. The first round (PCR1) was used to amplify specific genomic regions depending on the target. PCR1 products were purified by column purification. Round 2 PCR (PCR2) was done to add Illumina adapters and indexes. Reactions were then pooled, loaded onto a 2% E-gel EX for 10 minutes and gel extracted. Sequencing runs were done with a 150 cycle NextSeq v2.5 mid or high output kit.

[1029] Edited targets were defined as targets that showed indel levels above background (>1.0% in this assay) and greater than 10,000 read counts by Next Generation Sequencing. FIG. 17A shows indels induced in EMX1_T6 and VEGFA_T7 by several engineered Cas12i2 variants. FIG. 17B shows indels induced in EMX1_T6 and VEGFA_T7 by the Cas12i2 variants of SEQ ID NOs: 3-5 and 495. FIG. 18 shows indels induced in AAVS1_T6, AAVS1_T7, EMX1_T2, EMX1_T6, and VEGFA_T5 by the Cas12i2 variants of SEQ ID NOs: 4, 495, and 496.

[1030] This Example shows that the Cas12i2 variants of SEQ ID NO: 495 and SEQ ID NO: 496 induced increased indel levels at multiple target sites.

What is claimed is:

1. A variant Cas12i2 polypeptide comprising a sequence having at least 95% identity to a sequence set forth in any one of SEQ ID NOs: 3 to 146 or any one of SEQ ID NOs: 495 to 512.

2. The variant Cas12i2 polypeptide of claim 1, comprising the sequence set forth in SEQ ID NO: 4.

3. The variant Cas12i2 polypeptide of claim 1 or 2, comprising the sequence set forth in SEQ ID NO: 5.

4. The variant Cas12i2 polypeptide of claim 1, comprising the sequence set forth in SEQ ID NO: 495.

5. The variant Cas12i2 polypeptide of claim 1, comprising the sequence set forth in SEQ ID NO: 496.

6. The variant Cas12i2 polypeptide of any one of claims 1 to 5, further comprising a substitution of Table 2.

7. The variant Cas12i2 polypeptide of any one of claims 1 to 6, wherein the variant Cas12i2 polypeptide is a variant of a Cas12i2 polypeptide comprising the sequence set forth in SEQ ID NO: 2.

8. A composition comprising a variant Cas12i2 polypeptide of any one of claims 1 to 7, wherein the composition further comprises an RNA guide or a nucleic acid encoding the RNA guide, wherein the RNA guide comprises a direct repeat sequence and a spacer sequence.

9. The composition of claim 8, wherein the direct repeat sequence comprises a nucleotide sequence with at least 95% sequence identity to any one of SEQ ID NO: 492-494.

10. The composition of claim 9, wherein the direct repeat sequence comprises a nucleotide sequence set forth in any one of SEQ ID NO: 492-494.

11. The composition of any one of claims 8 to 10, wherein the spacer sequence comprises between about 11 and about 50 nucleotides.

12. The composition of claim 11, wherein the spacer sequence comprises between about 15 and about 35 nucleotides.

13. The composition of any one of claims 8 to 12, wherein the spacer sequence binds to a target nucleic acid sequence, and wherein the target nucleic acid sequence is adjacent to a 5′-NTTN-3′ sequence.

14. The variant Cas12i2 polypeptide of any one of claims 1 to 7, or the composition of any one of any one of claims 8 to 13, wherein the variant Cas12i2 polypeptide further comprises at least one nuclear localization signal (NLS), at least one nuclear export signal (NES), or at least one NLS and at least one NES.

15. The variant Cas12i2 polypeptide of any one of claims 1 to 7 or 14, or the composition of any one of claims 8 to 14, wherein the variant Cas12i2 polypeptide further comprises a peptide tag, a fluorescent protein, a base-editing domain, a DNA methylation domain, a histone residue modification domain, a localization factor, a transcription modification factor, a light-gated control factor, a chemically inducible factor, or a chromatin visualization factor.

16. The composition of any one of claims 8 to 15, wherein the composition is present in a delivery system comprising a nanoparticle, a liposome, an exosome, a microvesicle, or a gene-gun.

17. A nucleic acid molecule encoding a variant Cas12i2 polypeptide of any one of claims 1 to 7, 14, or 15.

18. A cell comprising the composition or variant Cas12i2 polypeptide of any previous claim.

19. The cell of claim 18, wherein the cell is a eukaryotic cell or a prokaryotic cell.

20. The cell of claim 18 or 19, wherein the cell is a mammalian cell or a plant cell.

21. The cell of any one of claims 18 to 20, wherein the cell is a human cell.

22. A composition or formulation comprising the variant Cas12i2 polypeptide of any one of claims 1 to 7, 14, or 15 and optionally an RNA guide and/or a cell.

23. A composition comprising a variant Cas12i2 polypeptide and an RNA guide, wherein the Cas12i2 variant polypeptide and the RNA guide form a complex, and wherein the variant Cas12i2 polypeptide exhibits increased complex formation with the RNA guide as compared to a parent polypeptide.

24. A composition comprising a variant Cas12i2 polypeptide and an RNA guide, wherein the Cas12i2 variant polypeptide and the RNA guide form a complex, and wherein the Cas12i2 variant polypeptide exhibits increased binding affinity to the RNA guide, as compared to a parent polypeptide.

25. A composition comprising a variant Cas12i2 polypeptide and an RNA guide, wherein the Cas12i2 variant polypeptide and the RNA guide form a complex, and the Cas12i2 variant polypeptide and the RNA guide exhibit increased protein-RNA interactions, as compared to a parent polypeptide and the RNA guide.

26. The composition of any one of claims 23 to 25, wherein the variant Cas12i2 polypeptide exhibits increased complex formation, increased binding affinity to the RNA guide and/or increased stability over a range of temperatures, e.g., 20° C. to 65° C.

27. The composition of any one of claims 23 to 26, wherein the variant Cas12i2 polypeptide exhibits increased complex formation, increased binding affinity to the RNA guide and/or increased stability over a range of incubation times.

28. The composition of any one of claims 23 to 27, wherein the variant Cas12i2 polypeptide exhibits increased complex formation, increased binding affinity to the RNA guide and/or increased stability in a buffer having a pH in a range of about 7.3 to about 8.6.

29. The composition of any one of claims 23 to 28, wherein the variant Cas12i2 polypeptide exhibits increased complex formation, increased binding affinity to the RNA guide and/or increased stability when a Tₘ value of the variant binary complex is at least 8° C. greater than the Tₘ value of the parent complex.

30. The composition of any one of claims 23 to 29, wherein the parent polypeptide comprises the amino acid sequence of SEQ ID NO: 2.

31. The composition of any one of claims 23 to 30, wherein the variant Cas12i2 polypeptide exhibits equivalent to or greater enzymatic activity than the parent polypeptide.

32. The composition of claim 31, wherein the equivalent to or greater enzymatic activity occurs at a temperature range from about 20° C. to about 90° C.

33. The composition of any one of claims 23 to 32, wherein the variant Cas12i2 polypeptide exhibits increased stability and/or protein-RNA interactions.

34. The composition of any one of claims 23 to 33, wherein the variant Cas12i2 polypeptide further lacks enzymatic activity.

35. The composition of claim 34, wherein the variant Cas12i2 polypeptide further exhibits increased enzymatic activity.

36. The composition of any one of claims 23 to 35, wherein the variant Cas12i2 polypeptide exhibits increased RNA guide complex formation, RNA guide binding activity and/or RNA guide binding specificity.

37. The composition of any one of claims 23 to 36, wherein the variant Cas12i2 polypeptide exhibits altered on-target binding.

38. The composition of any one of claims 23 to 37, wherein the variant Cas12i2 polypeptide exhibits altered off-target binding.

39. A composition comprising a variant Cas12i2 polypeptide and an RNA guide, wherein the Cas12i2 variant polypeptide and the RNA guide form a variant binary complex, and wherein the variant binary complex exhibits decreased complex dissociation than a complex formed by a parent polypeptide and the RNA guide.

40. A composition comprising a variant Cas12i2 polypeptide and an RNA guide, wherein the Cas12i2 variant polypeptide and the RNA guide form a variant binary complex, and wherein the RNA guide exhibits decreased dissociation from the variant Cas12i2 polypeptide than an RNA guide of a parent complex.

41. A composition comprising a variant Cas12i2 polypeptide and an RNA guide, wherein the Cas12i2 variant polypeptide and the RNA guide form a variant binary complex, and wherein the variant binary complex exhibits increased stability than a complex formed by a parent polypeptide and the RNA guide.

42. The composition of any one of claims 39 to 41, wherein the variant binary complex exhibits increased ternary complex formation, increased binding affinity to the target nucleic acid and/or increased stability over a range of temperatures, e.g., 20° C. to 65° C.

43. The composition of any one of claims 39 to 42, wherein the variant binary complex exhibits increased stability over a range of incubation times.

44. The composition of any one of claims 39 to 43, wherein the variant binary complex exhibits increased stability in a buffer having a pH in a range of about 7.3 to about 8.6.

45. The composition of any one of claims 39 to 44, wherein the variant binary complex exhibits increased ternary complex formation, increased binding affinity to the target nucleic acid and/or increased stability hen a Tₘ value of the variant binary complex is at least 8° C. greater than the Tₘ value of the parent complex.

46. The composition of any one of claims 39 to 45, wherein the parent polypeptide comprises the amino acid sequence of SEQ ID NO: 2.

47. The composition of any one of claims 39 to 46, wherein the variant Cas12i2 polypeptide exhibits equivalent or greater enzymatic activity than the parent polypeptide.

48. The composition of claim 47, wherein the equivalent or greater enzymatic activity occurs at a temperature range from about 20° C. to about 90° C.

49. The composition of any one of claims 39 to 48, wherein the variant Cas12i2 polypeptide exhibits increased stability and/or protein-RNA interactions.

50. The composition of any one of claims 39 to 49, wherein the variant Cas12i2 polypeptide further lacks enzymatic activity.

51. The composition of any one of claims 39 to 49, wherein the variant Cas12i2 polypeptide further exhibits increased enzymatic activity.

52. The composition of any one of claims 39 to 51, wherein the variant Cas12i2 polypeptide exhibits increased RNA guide complex formation, RNA guide binding activity and/or RNA guide binding specificity.

53. The composition of any one of claims 39 to 52, wherein the variant Cas12i2 polypeptide exhibits altered on-target binding.

54. The composition of any one of claims 39 to 53, wherein the variant Cas12i2 polypeptide exhibits altered off-target binding.

55. A method of complexing the variant Cas12i2 polypeptide with the RNA guide, e.g., RNA guide, of any one of claims 39 to 54.

56. A composition comprising a variant Cas12i2 polypeptide, an RNA guide and a target nucleic acid, wherein the variant Cas12i2 polypeptide and the RNA guide form a variant binary complex, and wherein the variant binary complex exhibits increased ternary complex formation with the target nucleic acid as compared to a parent binary complex.

57. A composition comprising a variant Cas12i2 polypeptide, an RNA guide and a target nucleic acid, wherein the Cas12i2 variant polypeptide and the RNA guide form a variant binary complex, and wherein the variant binary complex exhibits increased binding affinity to the target nucleic acid, as compared to a parent binary complex.

58. A composition comprising a variant Cas12i2 polypeptide, an RNA guide and target nucleic acid, wherein the Cas12i2 variant polypeptide and the RNA guide form a variant binary complex, and wherein the variant binary complex exhibit increased protein-RNA interactions as compared to a parent binary complex.

59. A composition comprising a variant Cas12i2 polypeptide, an RNA guide and target nucleic acid, wherein the Cas12i2 variant polypeptide and the RNA guide form a variant binary complex, and wherein the variant binary complex exhibit increased protein-DNA interactions as compared to a parent binary complex.

60. The composition of any one of claims 56 to 59, wherein the variant binary complex exhibits increased ternary complex formation, increased binding affinity to the target nucleic acid and/or increased stability over a range of temperatures, e.g., 20° C. to 65° C.

61. The composition of any one of claims 56 to 60, wherein the variant binary complex exhibits increased ternary complex formation, increased binding affinity to the target nucleic acid and/or increased stability over a range of incubation times.

62. The composition of any one of claims 56 to 61, wherein the variant binary complex exhibits increased ternary complex formation, increased binding affinity to the target nucleic acid and/or increased stability in a buffer having a pH in a range of about 7.3 to about 8.6.

63. The composition of any one of claims 56 to 62, wherein the variant binary complex exhibits increased ternary complex formation, increased binding affinity to the target nucleic acid and/or increased stability when a Tₘ value of the binary complex is at least 8° C. greater than the Tₘ value of the parent binary complex.

64. The composition of any one of claims 56 to 63, wherein the parent polypeptide comprises the amino acid sequence of SEQ ID NO: 2.

65. The composition of any one of claims 56 to 64, wherein the variant binary complex exhibits equivalent to or greater enzymatic activity than the parent binary complex.

66. The composition of claim 65, wherein the equivalent to or greater enzymatic activity occurs at a temperature range from about 20° C. to about 90° C.

67. The composition of any one of claims 56 to 66, wherein the variant binary complex exhibits increased stability and/or protein-RNA interactions.

68. The composition of any one of claims 56 to 67, wherein the variant binary complex exhibits increased stability and/or protein-DNA interactions.

69. The composition of any one of claims 56 to 68, wherein the variant binary complex further lacks enzymatic activity.

70. The composition of any one of claims 56 to 68, wherein the variant binary complex further exhibits increased enzymatic activity.

71. The composition of any one of claims 56 to 70, wherein the variant Cas12i2 polypeptide exhibits increased RNA guide complex formation, RNA guide binding activity and/or RNA guide binding specificity.

72. The composition of any one of claims 56 to 71, wherein the variant binary complex exhibits increased target nucleic acid complex formation, target nucleic acid activity and/or target nucleic acid specificity.

73. The composition of any one of claims 56 to 72, wherein the variant binary complex exhibits altered on-target binding.

74. The composition of any one of claims 56 to 73, wherein the variant binary complex exhibits altered off-target binding

75. A composition comprising a variant Cas12i2 polypeptide, an RNA guide and target nucleic acid, wherein the Cas12i2 variant polypeptide and the RNA guide form a variant binary complex, wherein the variant binary complex and target nucleic acid form a variant ternary complex, and wherein the variant ternary complex exhibits decreased complex dissociation than a parent ternary complex.

76. A composition comprising a variant Cas12i2 polypeptide, an RNA guide and target nucleic acid, wherein the Cas12i2 variant polypeptide and the RNA guide form a variant binary complex, wherein the variant binary complex and target nucleic acid form a variant ternary complex, and wherein the target nucleic acid exhibits decreased dissociation from the variant ternary complex than a parent ternary complex.

77. A composition comprising a variant Cas12i2 polypeptide, an RNA guide and target nucleic acid, wherein the Cas12i2 variant polypeptide and the RNA guide form a variant binary complex, wherein the variant binary complex and target nucleic acid form a variant ternary complex, and wherein the variant ternary complex exhibits increased stability than a parent ternary complex.

78. The composition of any one of claims 75 to 77, wherein the variant ternary complex exhibits increased stability over a range of temperatures, e.g., 20° C. to 65° C.

79. The composition of any one of claims 75 to 78, wherein the variant ternary complex exhibits increased stability over a range of incubation times.

80. The composition of any one of claims 75 to 79, wherein the variant ternary complex exhibits increased stability in a buffer having a pH in a range of about 7.3 to about 8.6.

81. The composition of any one of claims 75 to 80, wherein the variant ternary complex exhibits increased stability hen a Tₘ value of the variant ternary complex is at least 8° C. greater than the Tₘ value of the parent ternary complex.

82. The composition of any one of claims 75 to 81, wherein the parent polypeptide comprises the amino acid sequence of SEQ ID NO: 2.

83. The composition of any one of claims 75 to 82, wherein the variant Cas12i2 polypeptide exhibits equivalent or greater enzymatic activity than the parent polypeptide.

84. The composition of claim 83, wherein the equivalent or greater enzymatic activity occurs at a temperature range from about 20° C. to about 90° C.

85. The composition of any one of claims 75 to 84, wherein the variant Cas12i2 polypeptide exhibits increased stability and/or protein-RNA interactions.

86. The composition of any one of claims 75 to 85, wherein the variant binary complex exhibits increased stability and/or protein-DNA interactions.

87. The composition of any one of claims 75 to 86, wherein the variant ternary complex exhibits increased stability.

88. The composition of any one of claims 75 to 87, wherein the variant binary complex further lacks enzymatic activity.

89. The composition of any one of claims 75 to 87, wherein the variant binary complex further exhibits increased enzymatic activity.

90. The composition of any one of claims 75 to 89, wherein the variant Cas12i2 polypeptide exhibits increased RNA guide complex formation, RNA guide binding activity and/or RNA guide binding specificity.

91. The composition of any one of claims 75 to 90, wherein the variant binary complex exhibits increased target nucleic acid complex formation, target nucleic acid binding activity and/or target nucleic acid binding specificity.

92. The composition of any one of claims 75 to 91, wherein the variant binary complex exhibits altered on-target binding.

93. The composition of any one of claims 75 to 92, wherein the variant binary complex exhibits altered off-target binding.

94. A method of complexing the variant binary complex with the target nucleic acid, e.g., DNA, of any one of claims 75 to 93.

95. A composition comprising a variant Cas12i2 polypeptide and an RNA guide, wherein the variant Cas12i2 polypeptide and the RNA guide form a variant binary complex, and wherein the variant binary complex exhibits increased binding affinity to a target nucleic acid as compared to a parent binary complex.

96. A composition comprising a variant Cas12i2 polypeptide and an RNA guide, wherein the Cas12i2 variant polypeptide and the RNA guide form a variant binary complex, and wherein the variant binary complex exhibits increased target binding affinity to a target locus of a target nucleic acid as compared to a parent binary complex.

97. The composition of any one of claims 95 to 96, wherein the variant binary complex exhibits increased ternary complex formation and/or increased stability over a range of temperatures, e.g., 20° C. to 65° C.

98. The composition of any one of claims 95 to 97, wherein the variant binary complex exhibits increased ternary complex formation and/or increased stability over a range of incubation times.

99. The composition of any one of claims 95 to 98, wherein the variant binary complex exhibits increased ternary complex formation and/or increased stability in a buffer having a pH in a range of about 7.3 to about 8.6.

100. The composition of any one of claims 95 to 99, wherein the variant binary complex exhibits increased ternary complex formation and/or increased stability when a Tₘ value of the binary complex is at least 8° C. greater than the Tₘ value of the parent binary complex.

101. The composition of any one of claims 95 to 100, wherein the parent polypeptide comprises the amino acid sequence of SEQ ID NO: 2.

102. The composition of any one of claims 95 to 101, wherein the variant binary complex exhibits equivalent to or greater enzymatic activity than the parent binary complex.

103. The composition of claim 102, wherein the equivalent to or greater enzymatic activity occurs at a temperature range from about 20° C. to about 90° C.

104. The composition of any one of claims 95 to 103, wherein the variant binary complex exhibits increased stability and/or protein-RNA interactions.

105. The composition of any one of claims 95 to 104, wherein the variant binary complex exhibits increased stability and/or protein-DNA interactions.

106. The composition of any one of claims 95 to 105, wherein the variant binary complex further lacks enzymatic activity.

107. The composition of any one of claims 95 to 105, wherein the variant binary complex further exhibits increased enzymatic activity.

108. The composition of any one of claims 95 to 107, wherein the variant Cas12i2 polypeptide exhibits increased RNA guide complex formation, RNA guide binding activity and/or RNA guide binding specificity.

109. The composition of any one of claims 95 to 108, wherein the variant binary complex exhibits increased target nucleic acid complex formation, target nucleic acid activity and/or target nucleic acid specificity.

110. The composition of any one of claims 95 to 109, wherein the variant binary complex exhibits altered on-target binding.

111. The composition of any one of claims 95 to 110, wherein the variant binary complex exhibits altered off-target binding.

112. A composition comprising a plurality of variant Cas12i2 polypeptides and two or more distinct RNA guides, wherein the distinct RNA guides individually form variant binary complexes with separate variant Cas12i2 polypeptides, and wherein the variant binary complexes specifically bind with two or more target loci of a target nucleic acid.

113. A composition comprising a plurality of variant Cas12i2 polypeptides and two or more distinct RNA guides, wherein the distinct RNA guides individually form variant binary complexes with separate variant Cas12i2 polypeptides, and wherein the variant binary complexes exhibit increased on-target binding of two or more target loci of a target nucleic acid as compared to parent binary complexes.

114. A composition comprising a plurality of variant Cas12i2 polypeptides and two or more distinct RNA guides, wherein the distinct RNA guides individually form variant binary complexes with separate variant Cas12i2 polypeptides, and wherein the variant binary complexes exhibit increased on-target binding with two or more target loci of a target nucleic acid as compared to parent binary complexes.

115. A composition comprising a plurality of variant Cas12i2 polypeptides and two or more distinct RNA guides, wherein the distinct RNA guides individually form variant binary complexes with separate variant Cas12i2 polypeptides, and wherein the variant binary complexes exhibit on-target ternary complex formation with two or more target loci of a target nucleic acid.

116. A composition comprising a plurality of variant Cas12i2 polypeptides and two or more distinct RNA guides, wherein the distinct RNA guides individually form variant binary complexes with separate variant Cas12i2 polypeptides, and wherein the variant binary complexes exhibit increased ternary complex formation with two or more target loci of a target nucleic acid as compared to parent binary complexes.

117. The composition of any one of claims 112 to 116, wherein the variant binary complex exhibits increased ternary complex formation with the target nucleic acid and/or increased stability over a range of temperatures, e.g., 20° C. to 65° C.

118. The composition of any one of claims 112 to 117, wherein the variant binary complex exhibits increased ternary complex formation with the target nucleic acid and/or increased stability over a range of incubation times.

119. The composition of any one of claims 112 to 118, wherein the variant binary complex exhibits increased ternary complex formation with the target nucleic acid and/or increased stability in a buffer having a pH in a range of about 7.3 to about 8.6.

120. The composition of any one of claims 112 to 119, wherein the variant binary complex exhibits increased ternary complex formation with the target nucleic acid and/or increased stability when a Tₘ value of the binary complex is at least 8° C. greater than the Tₘ value of the parent binary complex.

121. The composition of any one of claims 112 to 120, wherein the parent polypeptide comprises the amino acid sequence of SEQ ID NO: 2.

122. The composition of any one of claims 112 to 121, wherein the variant Cas12i2 polypeptide exhibits equivalent or greater enzymatic activity than the parent polypeptide.

123. The composition of claim 122, wherein the equivalent or greater enzymatic activity occurs at a temperature range from about 20° C. to about 90° C.

124. The composition of any one of claims 112 to 123, wherein the variant Cas12i2 polypeptide exhibits increased stability and/or protein-RNA interactions.

125. The composition of any one of claims 112 to 124, wherein the variant binary complex exhibits increased stability and/or protein-DNA interactions.

126. The composition of any one of claims 112 to 125, wherein the variant binary complex further lacks enzymatic activity.

127. The composition of any one of claims 112 to 125, wherein the variant binary complex further exhibits increased enzymatic activity.

128. The composition of any one of claims 112 to 127, wherein the variant Cas12i2 polypeptide exhibits increased RNA guide complex formation, RNA guide binding activity and/or RNA guide binding specificity.

129. The composition of any one of claims 112 to 128, wherein the variant binary complex exhibits increased target nucleic acid ternary complex formation, target nucleic acid binding affinity and/or target nucleic acid binding specificity.

130. The composition of any one of claims 112 to 129, wherein the variant binary complex exhibits altered on-target binding.

131. The composition of any one of claims 112 to 130, wherein the variant binary complex exhibits altered off-target binding.

132. A method of complexing the variant binary complex with the target nucleic acid, e.g., DNA, of any one of claims 112 to 131.

133. A composition comprising a variant Cas12i2 polypeptide and an RNA guide, wherein the Cas12i2 variant polypeptide and the RNA guide form a variant binary complex, and wherein the variant binary complex exhibits increased on-target binding affinity to a target locus of a target nucleic acid as compared to a parent binary complex.

134. A composition comprising a variant Cas12i2 polypeptide and an RNA guide, wherein the variant Cas12i2 polypeptide and the RNA guide form a variant binary complex, and wherein the variant binary complex exhibits decreased binding affinity to a non-target locus of a target nucleic acid as compared to a parent binary complex.

135. A composition comprising a variant Cas12i2 polypeptide and an RNA guide, wherein the variant Cas12i2 polypeptide and the RNA guide form a variant binary complex, and wherein the variant binary complex exhibits increased activity at an on-target locus of a target nucleic acid as compared to a parent binary complex.

136. A composition comprising a variant Cas12i2 polypeptide and an RNA guide, wherein the variant Cas12i2 polypeptide and the RNA guide form a variant binary complex, and wherein the variant binary complex exhibits decreased activity at a non-target locus of a target nucleic acid as compared to a parent binary complex.

137. The composition of any one of claims 133 to 136, wherein the variant binary complex exhibits increased ternary complex formation at the target locus and/or increased stability over a range of temperatures, e.g., 20° C. to 65° C.

138. The composition of any one of claims 133 to 137, wherein the variant binary complex exhibits increased ternary complex formation at the target locus and/or increased stability over a range of incubation times.

139. The composition of any one of claims 133 to 138, wherein the variant binary complex exhibits increased ternary complex formation at the target locus and/or increased stability in a buffer having a pH in a range of about 7.3 to about 8.6.

140. The composition of any one of claims 133 to 139, wherein the variant binary complex exhibits increased ternary complex formation at the target locus and/or increased stability when a Tₘ value of the binary complex is at least 8° C. greater than the Tₘ value of the parent binary complex.

141. The composition of any one of claims 133 to 140, wherein the parent binary complex comprises a parent polypeptide that comprises the amino acid sequence of SEQ ID NO: 2.

142. The composition of claim 141, wherein the variant Cas12i2 polypeptide exhibits equivalent or greater enzymatic activity than the parent polypeptide.

143. The composition of claim 142, wherein the equivalent or greater enzymatic activity occurs at a temperature range from about 20° C. to about 90° C.

144. The composition of any one of claims 133 to 143, wherein the variant binary complex exhibits increased stability and/or protein-RNA interactions.

145. The composition of any one of claims 133 to 144, wherein the variant binary complex exhibits increased stability and/or protein-DNA interactions.

146. The composition of any one of claims 133 to 145, wherein the variant Cas12i2 polypeptide exhibits increased binary complex formation, RNA guide binding activity and/or RNA guide binding specificity.

147. A composition comprising a plurality of variant Cas12i2 polypeptides and two or more distinct RNA guides, wherein the distinct RNA guides individually form a plurality of variant binary complexes with separate variant Cas12i2 polypeptides, and wherein the plurality of variant binary complexes exhibit increased on-target binding to two or more target loci of a target nucleic acid as compared to a plurality of parent binary complexes.

148. A composition comprising a plurality of variant Cas12i2 polypeptides and two or more distinct RNA guides, wherein the distinct RNA guides individually form a plurality of variant binary complexes with separate variant Cas12i2 polypeptides, and wherein the plurality of variant binary complexes exhibit decreased off-target binding to two or more non-target loci of a target nucleic acid as compared to a plurality of parent binary complexes.

149. A composition comprising a plurality of variant Cas12i2 polypeptides and two or more distinct RNA guides, wherein the distinct RNA guides individually form a plurality of variant binary complexes with separate variant Cas12i2 polypeptides, and wherein the plurality of variant binary complexes exhibit increased on-target activity at two or more target loci of a target nucleic acid as compared to a plurality of parent binary complexes.

150. A composition comprising a plurality of variant Cas12i2 polypeptides and two or more distinct RNA guides, wherein the distinct RNA guides individually form a plurality of variant binary complexes with separate variant Cas12i2 polypeptides, and wherein the plurality of variant binary complexes exhibit decreased off-target activity at two or more non-target loci of a target nucleic acid as compared to a plurality of parent binary complexes.

151. The composition of any one of claims 147 to 150, wherein the plurality of variant binary complexes exhibit increased ternary complex formation at the target loci of the target nucleic acid and/or increased stability over a range of temperatures, e.g., 20° C. to 65° C.

152. The composition of any one of claims 147 to 151, wherein the plurality of variant binary complexes exhibit increased ternary complex formation at the target loci of the target nucleic acid and/or increased stability over a range of incubation times.

153. The composition of any one of claims 147 to 152, wherein the plurality of variant binary complexes exhibit increased ternary complex formation at the target loci the target nucleic acid and/or increased stability in a buffer having a pH in a range of about 7.3 to about 8.6.

154. The composition of any one of claims 147 to 153, wherein the plurality of variant binary complexes exhibit increased ternary complex formation at the target loci of the target nucleic acid and/or increased stability when a Tₘ value of the binary complex is at least 8° C. greater than the Tₘ value of the parent binary complex.

155. The composition of any one of claims 147 to 154, wherein the plurality of parent binary complexes comprise a parent polypeptide that comprises the amino acid sequence of SEQ ID NO: 2.

156. The composition of any one of claims 147 to 155, wherein the variant Cas12i2 polypeptide exhibits equivalent or greater enzymatic activity than the parent polypeptide.

157. The composition of claim 156, wherein the equivalent or greater enzymatic activity occurs at a temperature range from about 20° C. to about 90° C.

158. The composition of any one of claims 147 to 157, wherein the variant Cas12i2 polypeptide exhibits increased stability and/or protein-RNA interactions.

159. The composition of any one of claims 147 to 158, wherein the plurality of variant binary complexes exhibit increased stability and/or protein-DNA interactions.

160. The composition of any one of claims 147 to 159, wherein the variant Cas12i2 polypeptide exhibits increased binary complex formation, RNA guide binding activity and/or RNA guide binding specificity.

161. A method of complexing the variant binary complex with the target nucleic acid, e.g., DNA, of any one of claims 147 to 160.

162. A method of complexing the plurality of variant binary complexes with the target nucleic acid, e.g., DNA, of any one of claims 147 to 161.

163. The composition of any one of claims 23 to 54, 56 to 93, 95 to 131, and 133 to 160, wherein the variant Cas12i2 polypeptide comprises at least one of a D581, G624, F626, D835, L836, P868, S879, D911, 1926, V1020, V1030, E1035, and 51046 substitution of amino acid sequence of SEQ ID NO: 2.

164. The composition of any one of claims 23 to 54, 56 to 93, 95 to 131, 133 to 160, and 163, wherein the variant Cas12i2 polypeptide comprises at least one of a D581G, D581R, G624R, F626G, F626R, D835G, D835R, L836G, L836R, P868G, P868R, P868T, S879G, S879R, D911G, D911R, 1926G, 1926R, V1020G, V1020R, V1030G, V1030R, E1035G, E1035R, S1046G, and S1046R substitution of amino acid sequence of SEQ ID NO: 2.

165. The composition of any one of claims 23 to 54, 56 to 93, 95 to 131, 133 to 160, 163, and 164, wherein the variant Cas12i2 polypeptide comprises at least one of a D581R, G624R, F626R, P868T, D911R, I926R, V1030G, E1035R, and S1046G substitution of amino acid sequence of SEQ ID NO: 2.

166. The composition of any one of claims 23 to 54, 56 to 93, 95 to 131, 133 to 160, and 163 to 165, wherein the variant Cas12i2 polypeptide comprises at least one substitution listed in Table 1.

167. The composition of any one of claims 23 to 54, 56 to 93, 95 to 131, 133 to 160, and 163 to 166, wherein the variant Cas12i2 polypeptide comprises any one amino acid sequence of SEQ ID NO: 3 to 146 or any one amino acid sequence of SEQ ID NOs: 495 to 512.

168. The composition of any one of claims 23 to 54, 56 to 93, 95 to 131, 133 to 160, and 163 to 167, wherein the variant Cas12i2 polypeptide comprises at least one of an epitope peptide, nuclear localization signal, and nuclear export signal.

169. The composition of any one of claims 23 to 54, 56 to 93, 95 to 131, 133 to 160, and 163 to 168, wherein the RNA guide comprises a DNA targeting sequence.

170. The composition of claim 169, wherein the DNA targeting sequence is an RNA guide.

171. The composition of claim 169 or 170, wherein the DNA targeting sequence is between 13 to 30 nucleotides.

172. The composition of any one of claims 23 to 54, 56 to 93, 95 to 131, 133 to 160, and 163 to 171, wherein the RNA guide comprises a direct repeat sequence linked to a DNA targeting sequence.

173. The composition of any one of claims 23 to 54, 56 to 93, 95 to 131, 133 to 160, and 163 to 172, further comprising a target nucleic acid.

174. The composition of claim 173, wherein the target nucleic acid is present in a cell.

175. The composition of any one of claims 23 to 54, 56 to 93, 95 to 131, 133 to 160, and 163 to 174, wherein the variant Cas12i2 polypeptide and RNA guide are encoded in a vector, e.g., expression vector.

176. A cell comprising the composition of any one of claims 23 to 54, 56 to 93, 95 to 131, 133 to 160, and 163 to 175.

177. A method of expressing the vector of claim 175.

178. A method of producing the composition of any one of claims 23 to 54, 56 to 93, 95 to 131, 133 to 160, and 163 to 175.

179. A method of delivering the composition of any one of claims 23 to 54, 56 to 93, 95 to 131, 133 to 160, and 163 to 175.

180. A kit or system comprising a composition of any one of claims 23 to 54, 56 to 93, 95 to 131, 133 to 160, and 163 to 175 or one or more component thereof.

181. The composition of any one of claims 23 to 54, 56 to 93, 95 to 131, 133 to 160, and 163 to 175, wherein the RNA guide comprises or consists of, or about, 43 nucleotides.

182. The composition of any one of claims 23 to 54, 56 to 93, 95 to 131, 133 to 160, 163 to 175, and 181, wherein the RNA guide is a tracr-less RNA guide.

183. The composition of any one of claims 23 to 54, 56 to 93, 95 to 131, 133 to 160, 163 to 175, 181, and 182, wherein the variant Cas12i2 polypeptide further exhibits about 40× greater enzymatic activity than parent polypeptide.

184. The composition of any one of claims 23 to 54, 56 to 93, 95 to 131, 133 to 160, 163 to 175, and 181 to 183, wherein the variant Cas12i2 polypeptide exhibits increased on-target specificity as compared to the parent polypeptide.

185. The composition of any one of claims 23 to 54, 56 to 93, 95 to 131, 133 to 160, 163 to 175, and 181 to 184, wherein the variant Cas12i2 polypeptide exhibits decreased off-target specificity as compared to the parent polypeptide.

186. The composition of any one of claims 23 to 54, 56 to 93, 95 to 131, 133 to 160, 163 to 175, and 181 to 185, wherein the variant Cas12i2 polypeptide selectively induces a deletion adjacent to a 5′-NTTN-3′ sequence, wherein N is any nucleotide.

187. The composition of claim 186, wherein the deletion is downstream of the 5′-NTTN-3′ sequence.

188. The composition of claim 186 or 187, wherein the parent polypeptide does not induce the deletion.

189. The composition of any one of claims 186 to 188, wherein the length of the deletion is greater than the length of a Cas9 polypeptide-induced deletion.

190. The composition of any one of claims 186 to 189, wherein the deletion is in a gene of a cell.

191. The composition of any one of claims 186 to 190, wherein the deletion is up to about 40 nucleotides in length.

192. The composition of any one of claims 186 to 191, wherein the deletion is from about 4 nucleotides to 40 nucleotides in length.

193. The composition of any one of claims 186 to 192, wherein the deletion is from about 4 nucleotides to 25 nucleotides in length.

194. The composition of any one of claims 186 to 193, wherein the deletion is from about 10 nucleotides to 25 nucleotides in length.

195. The composition of any one of claims 186 to 194, wherein the deletion is from about 10 nucleotides to 15 nucleotides in length.

196. The composition of any one of claims 186 to 195, wherein the deletion starts within about 5 nucleotides to about 15 nucleotides of the 5′-NTTN-3′ sequence.

197. The composition of any one of claims 186 to 196, wherein the deletion starts within about 5 nucleotides to about 10 nucleotides of the 5′-NTTN-3′ sequence.

198. The composition of any one of claims 186 to 197, wherein the deletion starts within about 10 nucleotides to about 15 nucleotides of the 5′-NTTN-3′ sequence.

199. The composition of any one of claims 186 to 198, wherein the deletion starts within about 5 nucleotides to about 15 nucleotides downstream of the 5′-NTTN-3′ sequence.

200. The composition of any one of claims 186 to 199, wherein the deletion starts within about 5 nucleotides to about 10 nucleotides downstream of the 5′-NTTN-3′ sequence.

201. The composition of any one of claims 186 to 200, wherein the deletion starts within about 10 nucleotides to about 15 nucleotides downstream of the 5′-NTTN-3′ sequence.

202. The composition of any one of claims 186 to 201, wherein the deletion ends within about 20 nucleotides to about 30 nucleotides of the 5′-NTTN-3′ sequence.

203. The composition of any one of claims 186 to 202, wherein the deletion ends within about 20 nucleotides to about 25 nucleotides of the 5′-NTTN-3′ sequence.

204. The composition of any one of claims 186 to 203, wherein the deletion ends within about 25 nucleotides to about 30 nucleotides of the 5′-NTTN-3′ sequence.

205. The composition of any one of claims 186 to 204, wherein the deletion ends within about 20 nucleotides to about 30 nucleotides downstream of the 5′-NTTN-3′ sequence.

206. The composition of any one of claims 186 to 205, wherein the deletion ends within about 20 nucleotides to about 25 nucleotides downstream of the 5′-NTTN-3′ sequence.

207. The composition of any one of claims 186 to 206, wherein the deletion ends within about 25 nucleotides to about 30 nucleotides downstream of the 5′-NTTN-3′ sequence.

208. The composition of any one of claims 186 to 207, wherein the deletion starts within about 5 nucleotides to about 15 nucleotides downstream of the 5′-NTTN-3′ sequence and ends within about 20 nucleotides to about 30 nucleotides downstream of the 5′-NTTN-3′ sequence.

209. The composition of any one of claims 186 to 208, wherein the deletion starts within about 5 nucleotides to about 15 nucleotides downstream of the 5′-NTTN-3′ sequence and ends within about 20 nucleotides to about 25 nucleotides downstream of the 5′-NTTN-3′ sequence.

210. The composition of any one of claims 186 to 209, wherein the deletion starts within about 5 nucleotides to about 15 nucleotides downstream of the 5′-NTTN-3′ sequence and ends within about 25 nucleotides to about 30 nucleotides downstream of the 5′-NTTN-3′ sequence.

211. The composition of any one of claims 186 to 210, wherein the deletion starts within about 5 nucleotides to about 10 nucleotides downstream of the 5′-NTTN-3′ sequence and ends within about 20 nucleotides to about 30 nucleotides downstream of the 5′-NTTN-3′ sequence.

212. The composition of any one of claims 186 to 211, wherein the deletion starts within about 5 nucleotides to about 10 nucleotides downstream of the 5′-NTTN-3′ sequence and ends within about 20 nucleotides to about 25 nucleotides downstream of the 5′-NTTN-3′ sequence.

213. The composition of any one of claims 186 to 212, wherein the deletion starts within about 5 nucleotides to about 10 nucleotides downstream of the 5′-NTTN-3′ sequence and ends within about 25 nucleotides to about 30 nucleotides downstream of the 5′-NTTN-3′ sequence.

214. The composition of any one of claims 186 to 213, wherein the deletion starts within about 10 nucleotides to about 15 nucleotides downstream of the 5′-NTTN-3′ sequence and ends within about 20 nucleotides to about 30 nucleotides downstream of the 5′-NTTN-3′ sequence.

215. The composition of any one of claims 186 to 214, wherein the deletion starts within about 10 nucleotides to about 15 nucleotides downstream of the 5′-NTTN-3′ sequence and ends within about 20 nucleotides to about 25 nucleotides downstream of the 5′-NTTN-3′ sequence.

216. The composition of any one of claims 186 to 215, wherein the deletion starts within about 10 nucleotides to about 15 nucleotides downstream of the 5′-NTTN-3′ sequence and ends within about 25 nucleotides to about 30 nucleotides downstream of the 5′-NTTN-3′ sequence.

217. The composition of any one of claims 186 to 216, wherein the 5′-NTTN-3′ sequence is 5′-NTTY-3′, 5′-NTTC-3′, 5′-NTTT-3′, 5′-NTTA-3′, 5′-NTTB-3′, 5′-NTTG-3′, 5′-CTTY-3′, 5‘-DTTR’3′, 5′-CTTR-3′, 5′-DTTT-3′, 5′-ATTN-3′, or 5′-GTTN-3′, wherein Y is C or T, B is any nucleotide except for A, D is any nucleotide except for C, and R is A or G.

218. The composition of any one of claims 186 to 217, wherein the 5′-NTTN-3′ sequence is 5′-CTTT-3′, 5′-CTTC-3′, 5′-GTTT-3′, 5′-GTTC-3′, 5′-TTTC-3′, 5′-GTTA-3′, or 5′-GTTG-3′.

219. The composition of any one of claims 186 to 218, wherein the deletion is in an exon of the gene, e.g., B2M, TRAC, PDCD1.

220. The composition of any one of claims 186 to 219, wherein the deletion overlaps with a mutation in the gene.

221. The composition of any one of claims 186 to 220, wherein the deletion overlaps with an insertion in the gene.

222. The composition of any one of claims 186 to 221, wherein the deletion removes a repeat expansion of the gene.

223. The composition of any one of claims 186 to 222, wherein the deletion disrupts one or both alleles of the gene.

224. The composition of any one of claims 186 to 223, wherein the deletion is induced in a eukaryotic cell or a prokaryotic cell.

225. The composition of any one of claims 186 to 224, wherein the deletion is induced in an animal cell, a plant cell, or a fungal cell or the cell is derived from an animal cell, a plant cell, or a fungal cell.

226. The composition of any one of claims 186 to 225, wherein the deletion is induced in a mammalian cell or derived from a mammalian cell.

227. The composition of any one of claims 186 to 226, wherein the deletion is induced in a human cell or derived from a human cell.

228. The composition of any one of claims 186 to 227, wherein the deletion is induced in a primary cell.

229. The composition of any one of claims 186 to 228, wherein the deletion is induced in a cell line.

230. The composition of any one of claims 186 to 229, wherein the deletion is induced in a T cell.

231. The composition of any one of claims 186 to 230, wherein the deletion is induced in a stem cell (e.g., a totipotent/omnipotent stem cell, a pluripotent stem cell, a multipotent stem cell, an oligopotent stem cell, or an unipotent stem cell), a differentiated cell, or a terminally differentiated cell.

232. The composition of any one of claims 186 to 231, wherein 2 or more (e.g., multiplexed targeted deletions) deletions are induced.

233. A method of obtaining a deletion in a cell, wherein the method comprises contacting the variant Cas12i2 polypeptide or complex of any one of claims 1 to 16, 22 to 54, 56 to 93, 95 to 131, 133 to 160, 163 to 175, and 181 to 232 with DNA in the cell.

234. A composition or formulation comprising the variant Cas12i2 polypeptide of any one of claims 1 to 16, 22 to 54, 56 to 93, 95 to 131, 133 to 160, 163 to 175, and 181 to 232, an RNA guide, and a cell.

235. A method of producing the composition of any previous claim.

236. A method of complexing a variant Cas12i2 polypeptide of any previous claim with an RNA guide, such as an RNA guide of any previous claim.

237. A method of complexing a variant binary complex of any previous claim with a target nucleic acid.

238. A method of delivering the composition of any previous claim.

239. A composition comprising a variant Cas12i2 polypeptide, wherein the variant Cas12i2 polypeptide comprises a substitution that increases interactions between the variant Cas12i2 polypeptide and a nucleic acid, as compared to a parent polypeptide.

240. The composition of claim 239, wherein the variant Cas12i2 polypeptide comprises the sequence set forth in SEQ ID NO: 4.

241. The composition of claim 239, wherein the variant Cas12i2 polypeptide comprises the sequence set forth in any one of SEQ ID NO: 3, SEQ ID NO: 5, SEQ ID NO: 495, and SEQ ID NO: 496.

242. The composition of claim 239, wherein the interactions are electrostatic interactions.

243. The composition of claim 239, wherein the interactions are non-specific interactions.

244. The composition of claim 239, wherein the interactions are aromatic, hydrophobic, Van der Waals, and/or cation-pi interactions.

245. The composition of claim 239, wherein the substitution is in or adjacent to a nucleic acid interface.

246. The composition of any one of claims 239 to 245, wherein the nucleic acid is an RNA guide comprising a direct repeat sequence and a spacer sequence.

247. The composition of claim 246, wherein the direct repeat sequence comprises a nucleotide sequence with at least 95% sequence identity to any one of SEQ ID NO: 492-494.

248. The composition of claim 246, wherein the direct repeat sequence comprises a nucleotide sequence set forth in any one of SEQ ID NO: 492-494.

249. The composition of any one of claims 246 to 248, wherein the substitution increases interactions between the variant Cas12i2 polypeptide and the direct repeat sequence.

250. The composition of any one of claims 239 to 249, wherein the substitution increases binary complex formation, as compared to a parent polypeptide.

251. The composition of any one of claims 239 to 250, wherein a binary complex comprising the variant Cas12i2 polypeptide exhibits increased stability, as compared to a parent binary complex.

252. The composition of any one of claims 239 to 251, wherein the substitution is an arginine, lysine, glutamine, asparagine, histidine, tyrosine, or serine substitution.

253. The composition of any one of claims 239 to 252, wherein the substitution is in an RNA binding interface.

254. The composition of any one of claims 239 to 253, wherein the substitution is a substitution in the Wedge domain or Rec2 domain.

255. The composition of any one of claims 239 to 254, wherein the substitution is a substitution listed in Table 4.

256. The composition of any one of claims 239 to 254, wherein the variant Cas12i2 polypeptide comprises a sequence having at least 95% identity to a sequence set forth in any one of SEQ ID NOs: 3-146 or in any one of SEQ ID NOs: 495-512.

257. The composition of any one of claims 239 to 254, wherein the variant Cas12i2 polypeptide comprises a sequence having at least 95% identity to a sequence set forth in any one of SEQ ID NOs: 3-146 or in any one of SEQ ID NOs: 495-512 and further having a substitution listed in Table 4.

258. The composition of any one of claims 239 to 254, wherein the variant Cas12i2 polypeptide comprises a sequence set forth in any one of SEQ ID NOs: 3-146 or in any one of SEQ ID NOs: 495-512.

259. The composition of any one of claims 239 to 254, wherein the variant Cas12i2 polypeptide comprises a sequence set forth in any one of SEQ ID NOs: 3-146 or in any one of SEQ ID NOs: 495-512 and further has a substitution listed in Table 4.

260. The composition of any one of claims 246 and 249 to 254, wherein the direct repeat sequence is set forth in SEQ ID NO: 492 and the variant Cas12i2 polypeptide comprises a sequence set forth in SEQ ID NO: 4.

261. The composition of any one of claims 246 and 249 to 254, wherein the direct repeat sequence is set forth in SEQ ID NO: 492 and the variant Cas12i2 polypeptide comprises the sequence set forth in any one of SEQ ID NO: 3, SEQ ID NO: 5, SEQ ID NO: 495, and SEQ ID NO: 496.

262. The composition of any one of claims 239 to 245, wherein the nucleic acid is a target nucleic acid.

263. The composition of any one of claims 239 to 245 and 262, wherein the nucleic acid is double-stranded DNA.

264. The composition of claim 263, wherein the substitution increases interactions between the variant Cas12i2 polypeptide and double-stranded DNA.

265. The composition of claim 263 or claim 264 wherein the double-stranded DNA comprises a PAM sequence.

266. The composition of any one of claims 239 to 245 and 262 to 265, wherein the substitution increases ternary complex formation, as compared to a parent polypeptide.

267. The composition of any one of claims 239 to 245 and 262 to 266, wherein a ternary complex comprising the variant Cas12i2 polypeptide exhibits increased stability, as compared to a parent ternary complex.

268. The composition of any one of claims 239 to 245 and 262 to 267, wherein the substitution is an arginine, lysine, glutamine, asparagine, histidine, or serine substitution.

269. The composition of any one of claims 239 to 245 and 262 to 268, wherein the substitution is in a double-stranded DNA binding interface.

270. The composition of any one of claims 239 to 245 and 262 to 269, wherein the substitution is a substitution in the Rec1 domain, PI domain, or Wedge domain.

271. The composition of any one of claims 239 to 245 and 262 to 270, wherein the substitution is a substitution listed in Table 5.

272. The composition of any one of claims 239 to 245 and 262 to 270, wherein the variant Cas12i2 polypeptide comprises a sequence having at least 95% identity to a sequence set forth in any one of SEQ ID NOs: 3-146 or in any one of SEQ ID NOs: 495-512.

273. The composition of any one of claims 239 to 245 and 262 to 270, wherein the variant Cas12i2 polypeptide comprises a sequence having at least 95% identity to a sequence set forth in any one of SEQ ID NOs: 3-146 or in any one of SEQ ID NOs: 495-512 and further having a substitution listed in Table 5.

274. The composition of any one of claims 239 to 245 and 262 to 270, wherein the variant Cas12i2 polypeptide comprises a sequence set forth in any one of SEQ ID NOs: 3-146 or in any one of SEQ ID NOs: 495-512.

275. The composition of any one of claims 239 to 245 and 262 to 270, wherein the variant Cas12i2 polypeptide comprises a sequence set forth in any one of SEQ ID NOs: 3-146 or in any one of SEQ ID NOs: 495-512 and further has a substitution listed in Table 5.

276. The composition of any one of claims 239 to 245, wherein the nucleic acid is single-stranded DNA.

277. The composition of claim 276, wherein the single-stranded DNA comprises a non-target strand.

278. The composition of claim 276, wherein the single-stranded DNA comprises a target strand.

279. The composition of any one of claims 239 to 245 and 276 to 278, wherein the substitution increases ternary complex formation, as compared to a parent polypeptide.

280. The composition of any one of claims 239 to 245 and 276 to 279, wherein a ternary complex comprising the variant Cas12i2 polypeptide exhibits increased stability, as compared to a parent ternary complex.

281. The composition of any one of claims 239 to 245 and 276 to 280, wherein the substitution is an arginine, lysine, glutamine, asparagine, histidine, or alanine substitution.

282. The composition of any one of claims 239 to 245 and 276 to 281, wherein the substitution is in a single-stranded DNA binding interface.

283. The composition of any one of claims 239 to 245 and 276 to 282, wherein the substitution is a substitution in the PI domain, Rec1 domain, Wedge domain, RuvC domain, Rec2 domain, or Nuc domain.

284. The composition of any one of claims 239 to 245 and 276 to 283, wherein the substitution is a substitution listed in Table 6.

285. The composition of any one of claims 239 to 245 and 276 to 283, wherein the variant Cas12i2 polypeptide comprises a sequence having at least 95% identity to a sequence set forth in any one of SEQ ID NOs: 3-146 or in any one of SEQ ID NOs: 495-512.

286. The composition of any one of claims 239 to 245 and 276 to 283, wherein the variant Cas12i2 polypeptide comprises a sequence having at least 95% identity to a sequence set forth in any one of SEQ ID NOs: 3-146 or in any one of SEQ ID NOs: 495-512 and further having a substitution listed in Table 6.

287. The composition of any one of claims 239 to 245 and 276 to 283, wherein the variant Cas12i2 polypeptide comprises a sequence set forth in any one of SEQ ID NOs: 3-146 or in any one of SEQ ID NOs: 495-512.

288. The composition of any one of claims 239 to 245 and 276 to 283, wherein the variant Cas12i2 polypeptide comprises a sequence set forth in any one of SEQ ID NOs: 3-146 or in any one of SEQ ID NOs: 495-512 and further has a substitution listed in Table 6.

289. The composition of any one of claims 239 to 245, wherein the substitution increases interactions between the variant Cas12i2 polypeptide and a DNA/RNA hybrid molecule.

290. The composition of claim 289, wherein the DNA/RNA hybrid molecule is a heteroduplex comprising a spacer sequence of an RNA guide and a target strand.

291. The composition of any one of claims 239 to 245 and 289 to 290, wherein the substitution stabilizes the heteroduplex.

292. The composition of any one of claims 239 to 245 and 289 to 291, wherein the substitution increases ternary complex formation, as compared to a parent polypeptide.

293. The composition of any one of claims 239 to 245 and 289 to 292, wherein a ternary complex comprising the variant Cas12i2 polypeptide exhibits increased stability, as compared to a parent ternary complex.

294. The composition of any one of claims 239 to 245 and 289 to 293, wherein the substitution is an arginine, lysine, glutamine, asparagine, histidine, or serine substitution.

295. The composition of any one of claims 239 to 245 and 289 to 294, wherein the substitution is a substitution in the Rec1 domain, PI domain, Rec2 domain, or RuvC2 motif.

296. The composition of any one of claims 239 to 245 and 289 to 295, wherein the substitution is a substitution listed in Table 7.

297. The composition of any one of claims 239 to 245 and 289 to 295, wherein the variant Cas12i2 polypeptide comprises a sequence having at least 95% identity to a sequence set forth in any one of SEQ ID NOs: 3-146 or in any one of SEQ ID NOs: 495-512.

298. The composition of any one of claims 239 to 245 and 289 to 295, wherein the variant Cas12i2 polypeptide comprises a sequence having at least 95% identity to a sequence set forth in any one of SEQ ID NOs: 3-146 or in any one of SEQ ID NOs: 495-512 and further having a substitution listed in Table 7.

299. The composition of any one of claims 239 to 245 and 289 to 295, wherein the variant Cas12i2 polypeptide comprises a sequence set forth in any one of SEQ ID NOs: 3-146 or in any one of SEQ ID NOs: 495-512.

300. The composition of any one of claims 239 to 245 and 289 to 295, wherein the variant Cas12i2 polypeptide comprises a sequence set forth in any one of SEQ ID NOs: 3-146 or in any one of SEQ ID NOs: 495-512 and further has a substitution listed in Table 7.

301. The composition of any one of claims 239 to 245, wherein the substitution increases interactions between the variant Cas12i2 polypeptide and bases of (a) a double-stranded DNA duplex and/or (b) a heteroduplex comprising a spacer sequence of an RNA guide and a target strand.

302. The composition of claim 301, wherein the double-stranded DNA duplex comprises a PAM sequence.

303. The composition of any one of claims 239 to 245 and 301 to 302, wherein the interactions are aromatic, hydrophobic, Van der Waals, and/or cation-pi interactions.

304. The composition of any one of claims 239 to 245 and 301 to 303, wherein the substitution stabilizes the R-loop.

305. The composition of any one of claims 239 to 245 and 301 to 304, wherein the substitution increases ternary complex formation, as compared to a parent polypeptide.

306. The composition of any one of claims 239 to 245 and 301 to 305, wherein a ternary complex comprising the variant Cas12i2 polypeptide exhibits increased stability, as compared to a parent ternary complex.

307. The composition of any one of claims 239 to 245 and 301 to 306, wherein the substitution is an arginine, lysine, tryptophan, phenylalanine, tyrosine, methionine, histidine, glutamine, threonine, or valine substitution.

308. The composition of any one of claims 239 to 245 and 301 to 307, wherein the substitution is a substitution in the Wedge domain, Rec1 domain, or RuvC domain.

309. The composition of any one of claims 239 to 245 and 301 to 308, wherein the substitution is a substitution listed in Table 8.

310. The composition of any one of claims 239 to 245 and 301 to 308, wherein the variant Cas12i2 polypeptide comprises a sequence having at least 95% identity to a sequence set forth in any one of SEQ ID NOs: 3-146 or in any one of SEQ ID NOs: 495-512.

311. The composition of any one of claims 239 to 245 and 301 to 308, wherein the variant Cas12i2 polypeptide comprises a sequence having at least 95% identity to a sequence set forth in any one of SEQ ID NOs: 3-146 or in any one of SEQ ID NOs: 495-512 and further having a substitution listed in Table 8.

312. The composition of any one of claims 239 to 245 and 301 to 308, wherein the variant Cas12i2 polypeptide comprises a sequence set forth in any one of SEQ ID NOs: 3-146 or in any one of SEQ ID NOs: 495-512.

313. The composition of any one of claims 239 to 245 and 301 to 308, wherein the variant Cas12i2 polypeptide comprises a sequence set forth in any one of SEQ ID NOs: 3-146 or in any one of SEQ ID NOs: 495-512 and further has a substitution listed in Table 8.

314. The composition of any one of claims 239 to 313, wherein the parent polypeptide comprises the amino acid sequence of SEQ ID NO: 2.

315. The composition of any one of claims 239 to 314, wherein the variant Cas12i2 polypeptide exhibits increased enzymatic activity, as compared to a parent polypeptide.

316. The composition of any one of claims 239 to 315, wherein the composition further comprises an RNA guide comprising a direct repeat sequence and a spacer sequence.

317. The composition of claim 316, wherein the direct repeat sequence comprises a nucleotide sequence with at least 95% sequence identity to any one of SEQ ID NO: 492-494.

318. The composition of claim 316, wherein the direct repeat sequence comprises a nucleotide sequence set forth in any one of SEQ ID NO: 492-494.

319. The composition of claim 316, wherein the direct repeat sequence is set forth in SEQ ID NO: 492 and the variant Cas12i2 polypeptide comprises a sequence set forth in SEQ ID NO: 4.

320. The composition of claim 316, wherein the direct repeat sequence is set forth in SEQ ID NO: 492 and the variant Cas12i2 polypeptide comprises the sequence set forth in any one of SEQ ID NO: 3, SEQ ID NO: 5, SEQ ID NO: 495, and SEQ ID NO: 496.

321. A cell comprising the composition of any one of claims 239 to 320.

322. The cell of claim 321, wherein the composition does not substantially affect viability of the cell.

323. A composition comprising a variant Cas12i2 polypeptide, wherein the variant Cas12i2 polypeptide comprises a substitution that increases flexibility of the variant Cas12i2 polypeptide during DNA binding, as compared to a parent polypeptide.

324. The composition of claim 323, wherein the variant Cas12i2 polypeptide comprises the sequence set forth in SEQ ID NO: 4.

325. The composition of claim 323, wherein the Cas12i2 polypeptide comprises the sequence set forth in any one of SEQ ID NO: 3, SEQ ID NO: 5, SEQ ID NO: 495, and SEQ ID NO: 496.

326. The composition of any one of claims 323 to 325, wherein the substitution increases binding of the variant Cas12i2 polypeptide to DNA.

327. The composition of any one of claims 323 to 326, wherein the substitution increases binding of the variant Cas12i2 polypeptide to double-stranded DNA.

328. The composition of any one of claims 323 to 327, wherein the substitution increases binding of the variant Cas12i2 polypeptide to single-strand DNA.

329. The composition of any one of claims 323 to 328, wherein the substitution increases ternary complex formation, as compared to a parent polypeptide.

330. The composition of any one of claims 323 to 329, wherein a ternary complex comprising the variant Cas12i2 polypeptide exhibits increased stability, as compared to a parent ternary complex.

331. The composition of any one of claims 323 to 330, wherein the substitution is a substitution of a bulky amino acid to an amino acid with a smaller side chain.

332. The composition of any one of claims 323 to 331, wherein the substitution is an alanine, valine, glycine, or serine substitution.

333. The composition of any one of claims 323 to 332, wherein the substitution is in the Helical II domain of the variant Cas12i2 polypeptide.

334. The composition of any one of claims 323 to 333, wherein the substitution is a substitution listed in Table 9.

335. The composition of any one of claims 323 to 332, wherein the variant Cas12i2 polypeptide comprises a sequence having at least 95% identity to a sequence set forth in any one of SEQ ID NOs: 3-146 or in any one of SEQ ID NOs: 495-512.

336. The composition of any one of claims 323 to 332, wherein the variant Cas12i2 polypeptide comprises a sequence having at least 95% identity to a sequence set forth in any one of SEQ ID NOs: 3-146 or in any one of SEQ ID NOs: 495-512 and further having a substitution listed in Table 9.

337. The composition of any one of claims 323 to 332, wherein the variant Cas12i2 polypeptide comprises a sequence set forth in any one of SEQ ID NOs: 3-146 or in any one of SEQ ID NOs: 495-512.

338. The composition of any one of claims 323 to 332, wherein the variant Cas12i2 polypeptide comprises a sequence set forth in any one of SEQ ID NOs: 3-146 or in any one of SEQ ID NOs: 495-512 and further has a substitution listed in Table 9.

339. A composition comprising a variant Cas12i2 polypeptide, wherein the variant Cas12i2 polypeptide comprises a substitution that stabilizes a domain-domain interface that forms during ternary complex formation, as compared to a parent polypeptide.

340. The composition of claim 339, wherein the variant Cas12i2 polypeptide comprises the sequence set forth in SEQ ID NO: 4.

341. The composition of claim 339, wherein the variant Cas12i2 polypeptide comprises the sequence set forth in any one of SEQ ID NO: 3, SEQ ID NO: 5, SEQ ID NO: 495, and SEQ ID NO: 496.

342. The composition of any one of claims 339 to 341, wherein the domain-domain interface forms when single-stranded DNA contacts an active site of the variant Cas12i2 polypeptide.

343. The composition of any one of claims 339 to 342, wherein the domain-domain interface is a Helical II domain-Nuc domain interface.

344. The composition of any one of claims 339 to 343, wherein the substitution increases ternary complex formation, as compared to a parent polypeptide.

345. The composition of any one of claims 339 to 344, wherein a ternary complex comprising the variant Cas12i2 polypeptide exhibits increased stability, as compared to a parent ternary complex.

346. The composition of any one of claims 339 to 345, wherein the substitution is an aspartic acid, glutamic acid, arginine, or lysine substitution.

347. The composition of any one of claims 339 to 346, wherein the substitution is a substitution listed in Table 10.

348. The composition of any one of claims 339 to 346, wherein the variant Cas12i2 polypeptide comprises a sequence having at least 95% identity to a sequence set forth in any one of SEQ ID NOs: 3-146 or in any one of SEQ ID NOs: 495-512.

349. The composition of any one of claims 339 to 346, wherein the variant Cas12i2 polypeptide comprises a sequence having at least 95% identity to a sequence set forth in any one of SEQ ID NOs: 3-146 or in any one of SEQ ID NOs: 495-512 and further having a substitution listed in Table 10.

350. The composition of any one of claims 339 to 346, wherein the variant Cas12i2 polypeptide comprises a sequence set forth in any one of SEQ ID NOs: 3-146 or in any one of SEQ ID NOs: 495-512.

351. The composition of one of claims 339 to 346, wherein the variant Cas12i2 polypeptide comprises a sequence set forth in any one of SEQ ID NOs: 3-146 or in any one of SEQ ID NOs: 495-512 and further has a substitution listed in Table 10.

352. The composition of any one of claims 323 to 351, wherein the parent polypeptide comprises the amino acid sequence of SEQ ID NO: 2.

353. The composition of any one of claims 323 to 352, wherein the variant Cas12i2 polypeptide exhibits increased enzymatic activity, as compared to a parent polypeptide.

354. The composition of any one of claims 323 to 353, wherein the composition further comprises an RNA guide comprising a direct repeat sequence and a spacer sequence.

355. The composition of claim 354, wherein the direct repeat sequence comprises a nucleotide sequence with at least 95% sequence identity to any one of SEQ ID NO: 492-494.

356. The composition of claim 354, wherein the direct repeat sequence comprises a nucleotide sequence set forth in any one of SEQ ID NO: 492-494.

357. The composition of claim 354, wherein the direct repeat sequence is set forth in SEQ ID NO: 492 and the variant Cas12i2 polypeptide comprises a sequence set forth in SEQ ID NO: 4.

358. The composition of claim 354, wherein the direct repeat sequence is set forth in SEQ ID NO: 492 and the variant Cas12i2 polypeptide comprises the sequence set forth in any one of SEQ ID NO: 3, SEQ ID NO: 5, SEQ ID NO: 495, and SEQ ID NO: 496.

359. A cell comprising the composition of any one of claims 323 to 358.

360. The cell of claim 359, wherein the composition does not substantially affect viability of the cell.

361. A composition comprising a variant Cas12i2 polypeptide, wherein the variant Cas12i2 polypeptide comprises a substitution that increases on-target specificity of the variant Cas12i2 polypeptide, as compared to a parent polypeptide.

362. The composition of claim 361, wherein the variant Cas12i2 polypeptide comprises the sequence set forth in SEQ ID NO: 4.

363. The composition of claim 361, wherein the variant Cas12i2 polypeptide comprises the sequence set forth in any one of SEQ ID NO: 3, SEQ ID NO: 5, SEQ ID NO: 495, and SEQ ID NO: 496.

364. The composition of any of claims 361 to 363, wherein the substitution increases on-target DNA binding.

365. The composition of any one of claims 361 to 364, wherein the substitution decreases off-target DNA binding.

366. The composition of any one of claims 361 to 365, wherein the substitution increases on-target ternary complex formation, as compared to a parent polypeptide.

367. The composition of any one of claims 361 to 366, wherein an on-target ternary complex comprising the variant Cas12i2 polypeptide exhibits increased stability, as compared to a parent ternary complex.

368. The composition of any one of claims 361 to 367, wherein the substitution is a substitution of an amino acid contacting the spacer sequence of an RNA guide.

369. The composition of any one of claims 361 to 368, wherein the substitution is a substitution of a bulky amino acid to an amino acid with a smaller side chain.

370. The composition of any one of claims 361 to 369, wherein the substitution is an alanine, serine, valine, glutamine, or asparagine substitution.

371. The composition of any one of claims 361 to 370, wherein the substitution is a substitution in the Wedge domain, Rec1 domain, Rec2 domain, or RuvC domain.

372. The composition of any one of claims 361 to 371, wherein the substitution is a substitution in the Helical II domain.

373. The composition of any one of claims 361 to 372, wherein the substitution is a substitution listed in Table 11.

374. The composition of any one of claims 361 to 372, wherein the variant Cas12i2 polypeptide comprises a sequence having at least 95% identity to a sequence set forth in any one of SEQ ID NOs: 3-146 or in any one of SEQ ID NOs: 495-512.

375. The composition of any one of claims 361 to 372, wherein the variant Cas12i2 polypeptide comprises a sequence having at least 95% identity to a sequence set forth in any one of SEQ ID NOs: 3-146 or in any one of SEQ ID NOs: 495-512 and further having a substitution listed in Table 11.

376. The composition of any one of claims 361 to 372, wherein the variant Cas12i2 polypeptide comprises a sequence set forth in any one of SEQ ID NOs: 3-146 or in any one of SEQ ID NOs: 495-512.

377. The composition of any one of claims 361 to 372, wherein the variant Cas12i2 polypeptide comprises a sequence set forth in any one of SEQ ID NOs: 3-146 or in any one of SEQ ID NOs: 495-512 and further has a substitution listed in Table 11.

378. The composition of any one of claims 361 to 367, wherein the substitution decreases a catalysis rate (Kcat) of the variant Cas12i2 polypeptide.

379. The composition of any one of claims 361 to 367 and 378, wherein the substitution is an alanine, serine, threonine, valine, leucine, methionine, asparagine, or isoleucine substitution.

380. The composition of any one of claims 361 to 367 and 378 to 379, wherein the substitution is a substitution in the Wedge domain, Rec1 domain, Rec2 domain, or RuvC domain.

381. The composition of any one of claims 361 to 367 and 378 to 380, wherein the substitution is a substitution in the RuvC domain.

382. The composition of any one of claims 361 to 367 and 378 to 381, wherein the substitution is a substitution listed in Table 12.

383. The composition of any one of claims 361 to 367 and 378 to 381, wherein the variant Cas12i2 polypeptide comprises a sequence having at least 95% identity to a sequence set forth in any one of SEQ ID NOs: 3-146 or in any one of SEQ ID NOs: 495-512.

384. The composition of any one of claims 361 to 367 and 378 to 381, wherein the variant Cas12i2 polypeptide comprises a sequence having at least 95% identity to a sequence set forth in any one of SEQ ID NOs: 3-146 or in any one of SEQ ID NOs: 495-512 and further having a substitution listed in Table 12.

385. The composition of any one of claims 361 to 367 and 378 to 381, wherein the variant Cas12i2 polypeptide comprises a sequence set forth in any one of SEQ ID NOs: 3-146 or in any one of SEQ ID NOs: 495-512.

386. The composition of any one of claims 361 to 367 and 378 to 381, wherein the variant Cas12i2 polypeptide comprises a sequence set forth in any one of SEQ ID NOs: 3-146 or in any one of SEQ ID NOs: 495-512 and further has a substitution listed in Table 12.

387. The composition of one of claims 361 to 386, wherein the variant Cas12i2 polypeptide exhibits increased on-target enzymatic activity, as compared to a parent polypeptide.

388. The composition of any one of claims 361 to 387, wherein the variant Cas12i2 polypeptide exhibits decreased off-target enzymatic activity, as compared to a parent polypeptide.

389. The composition of any one of claims 361 to 388, wherein the variant Cas12i2 polypeptide exhibits off-target editing that is no more than 10% of the on-target editing.

390. The composition of any one of claims 361 to 388, wherein the variant Cas12i2 polypeptide exhibits off-target editing that is no more than 5% of the on-target editing.

391. The composition of any one of claims 361 to 390, wherein the composition further comprises an RNA guide comprising a direct repeat sequence and a spacer sequence.

392. The composition of claim 391, wherein the direct repeat sequence comprises a nucleotide sequence with at least 95% sequence identity to any one of SEQ ID NO: 492-494.

393. The composition of claim 391, wherein the direct repeat sequence comprises a nucleotide sequence set forth in any one of SEQ ID NO: 492-494.

394. The composition of claim 391, wherein the direct repeat sequence is set forth in SEQ ID NO: 492 and the variant Cas12i2 polypeptide comprises a sequence set forth in SEQ ID NO: 4.

395. The composition of claim 391, wherein the direct repeat sequence is set forth in SEQ ID NO: 492 and the variant Cas12i2 polypeptide comprises the sequence set forth in any one of SEQ ID NO: 3, SEQ ID NO: 5, SEQ ID NO: 495, and SEQ ID NO: 496.

396. The composition of any one of claims 365 to 395, wherein the variant Cas12i2 polypeptide exhibits a higher ratio of on-target binding to off-target binding, as compared to a Cas9 polypeptide.

397. The composition of any one of claims 365 to 396, wherein the variant Cas12i2 polypeptide exhibits a higher ratio of on-target activity to off-target activity, as compared to a Cas9 polypeptide.

398. The composition of any one of claims 365 to 397, wherein the variant Cas12i2 polypeptide exhibits a higher ratio of on-target editing to off-target editing, as compared to a Cas9 polypeptide.

399. The composition of any one of claims 365 to 395, wherein the variant Cas12i2 polypeptide exhibits less off-target binding, as compared to a Cas9 polypeptide.

400. The composition of any one of claims 365 to 396, wherein the variant Cas12i2 polypeptide exhibits less off-target activity, as compared to a Cas9 polypeptide.

401. The composition of any one of claims 365 to 397, wherein the variant Cas12i2 polypeptide exhibits less off-target editing, as compared to a Cas9 polypeptide.

402. The composition of any one of claims 365 to 401, wherein off-target binding, off-target activity, and/or off-target editing by the variant Cas12i2 polypeptide is at least 10% less than off-target binding, off-target activity, and/or off-target editing by a Cas9 polypeptide.

403. The composition of any one of claims 365 to 402, wherein off-target binding, off-target activity, and/or off-target editing by the variant Cas12i2 polypeptide is at least 20% less than off-target binding, off-target activity, and/or off-target editing by a Cas9 polypeptide.

404. The composition of any one of claims 365 to 403, wherein off-target binding, off-target activity, and/or off-target editing by the variant Cas12i2 polypeptide is at least 30% less than off-target binding, off-target activity, and/or off-target editing by a Cas9 polypeptide.

405. The composition of any one of claims 365 to 404, wherein off-target binding, off-target activity, and/or off-target editing by the variant Cas12i2 polypeptide is at least 40% less than off-target binding, off-target activity, and/or off-target editing by a Cas9 polypeptide.

406. The composition of any one of claims 365 to 405, wherein off-target binding, off-target activity, and/or off-target editing by the variant Cas12i2 polypeptide is at least 50% less than off-target binding, off-target activity, and/or off-target editing by a Cas9 polypeptide.

407. A cell comprising the composition of any one of claims 365 to 406.

408. The cell of claim 407, wherein the composition does not substantially affect viability of the cell.

The application's sequence listing, which the Patent Office published only in electronic form, follows.

SEQUENCE LISTING (615 sequences)

SEQ ID NO: 1 - DNA, 3162 bp, Artificial Sequence
  Synthetic sequence
atgagcagcgcgatcaaaagctacaagagcgttctgcgtccgaacgagcgtaagaaccaactgctgaaaagcaccattcagtgcctggaagacggtagcgcgttctttttcaagatgctgcaaggcctgtttggtggcatcaccccggagattgttcgtttcagcaccgaacaggagaaacagcaacaggatatcgcgctgtggtgcgcggttaactggttccgtccggtgagccaagacagcctgacccacaccattgcgagcgataacctggtggagaagtttgaggaatactatggtggcaccgcgagcgacgcgatcaaacagtacttcagcgcgagcattggcgaaagctactattggaacgactgccgtcaacagtactatgatctgtgccgtgagctgggtgttgaggtgagcgacctgacccatgatctggagatcctgtgccgtgaaaagtgcctggcggttgcgaccgagagcaaccagaacaacagcatcattagcgttctgtttggcaccggcgaaaaagaggaccgtagcgtgaaactgcgtatcaccaagaaaattctggaggcgatcagcaacctgaaagaaatcccgaagaacgttgcgccgattcaagagatcattctgaacgtggcgaaagcgaccaaggaaaccttccgtcaggtgtatgcgggtaacctgggtgcgccgagcaccctggagaaatttatcgcgaaggacggccaaaaagagttcgatctgaagaaactgcagaccgacctgaagaaagttattcgtggtaaaagcaaggagcgtgattggtgctgccaggaagagctgcgtagctacgtggagcaaaacaccatccagtatgacctgtgggcgtggggcgaaatgttcaacaaagcgcacaccgcgctgaaaatcaagagcacccgtaactacaactttgcgaagcaacgtctggaacagttcaaagagattcagagcctgaacaacctgctggttgtgaagaagctgaacgactttttcgatagcgaatttttcagcggcgaggaaacctacaccatctgcgttcaccatctgggtggcaaggacctgagcaaactgtataaggcgtgggaggatgatccggcggacccggaaaacgcgattgtggttctgtgcgacgatctgaaaaacaactttaagaaagagccgatccgtaacattctgcgttacatcttcaccattcgtcaagaatgcagcgcgcaggacatcctggcggcggcgaagtacaaccaacagctggatcgttataaaagccaaaaggcgaacccgagcgttctgggtaaccagggctttacctggaccaacgcggtgatcctgccggagaaggcgcagcgtaacgaccgtccgaacagcctggatctgcgtatttggctgtacctgaaactgcgtcacccggacggtcgttggaagaaacaccatatcccgttctacgatacccgtttcttccaagaaatttatgcggcgggcaacagcccggttgacacctgccagtttcgtaccccgcgtttcggttatcacctgccgaaactgaccgatcagaccgcgatccgtgttaacaagaaacatgtgaaagcggcgaagaccgaggcgcgtattcgtctggcgatccaacagggcaccctgccggtgagcaacctgaagatcaccgaaattagcgcgaccatcaacagcaaaggtcaagtgcgtattccggttaagtttgacgtgggtcgtcaaaaaggcaccctgcagatcggtgaccgtttctgcggctacgatcaaaaccagaccgcgagccacgcgtatagcctgtgggaagtggttaaagagggtcaataccataaagagctgggctgctttgttcgtttcatcagcagcggtgacatcgtgagcattaccgagaaccgtggcaaccaatttgatcagctgagctatgaaggtctggcgtacccgcaatatgcggactggcgtaagaaagcgagcaagttcgtgagcctgtggcagatcaccaagaaaaacaagaaaaaggaaatcgtgaccgttgaagcgaaagagaagtttgacgcgatctgcaagtaccagccgcgtctgtataaattcaacaaggagtacgcgtatctgctgcgtgatattgttcgtggcaaaagcctggtggaactgcaacagattcgtcaagagatctttcgtttcattgaacaggactgcggtgttacccgtctgggcagcctgagcctgagcaccctggaaaccgtgaaagcggttaagggtatcatttacagctattttagcaccgcgctgaacgcgagcaagaacaacccgatcagcgacgaacagcgtaaagagtttgatccggaactgttcgcgctgctggaaaagctggagctgattcgtacccgtaaaaagaaacaaaaagtggaacgtatcgcgaacagcctgattcagacctgcctggagaacaacatcaagttcattcgtggtgaaggcgacctgagcaccaccaacaacgcgaccaagaaaaaggcgaacagccgtagcatggattggttggcgcgtggtgtttttaacaaaatccgtcaactggcgccgatgcacaacattaccctgttcggttgcggcagcctgtacaccagccaccaggacccgctggtgcatcgtaacccggataaagcgatgaagtgccgttgggcggcgatcccggttaaggacattggcgattgggtgctgcgtaagctgagccaaaacctgcgtgcgaaaaacatcggcaccggcgagtactatcaccaaggtgttaaagagttcctgagccattatgaactgcaggacctggaggaagagctgctgaagtggcgtagcgatcgtaaaagcaacattccgtgctgggtgctgcagaaccgtctggcggagaagctgggcaacaaagaagcggtggtttacatcccggttcgtggtggccgtatttattttgcgacccacaaggtggcgaccggtgcggtgagcatcgttttcgaccaaaaacaagtgtgggtttgcaacgcggatcatgttgcggcggcgaacatcgcgctgaccgtgaagggtattggcgaacaaagcagcgacgaagagaacccggatggtagccgtatcaaactgcagctgaccagc

SEQ ID NO: 2 - protein, 1054 aa, Artificial Sequence
  Synthetic sequence
MSSAIKSYKSVLRPNERKNQLLKSTIQCLEDGSAFFFKMLQGLFGGITPEIVRFSTEQEKQQQDIALWCAVNWFRPVSQDSLTHTIASDNLVEKFEEYYGGTASDAIKQYFSASIGESYYWNDCRQQYYDLCRELGVEVSDLTHDLEILCREKCLAVATESNQNNSIISVLFGTGEKEDRSVKLRITKKILEAISNLKEIPKNVAPIQEIILNVAKATKETFRQVYAGNLGAPSTLEKFIAKDGQKEFDLKKLQTDLKKVIRGKSKERDWCCQEELRSYVEQNTIQYDLWAWGEMFNKAHTALKIKSTRNYNFAKQRLEQFKEIQSLNNLLVVKKLNDFFDSEFFSGEETYTICVHHLGGKDLSKLYKAWEDDPADPENAIVVLCDDLKNNFKKEPIRNILRYIFTIRQECSAQDILAAAKYNQQLDRYKSQKANPSVLGNQGFTWTNAVILPEKAQRNDRPNSLDLRIWLYLKLRHPDGRWKKHHIPFYDTRFFQEIYAAGNSPVDTCQFRTPRFGYHLPKLTDQTAIRVNKKHVKAAKTEARIRLAIQQGTLPVSNLKITEISATINSKGQVRIPVKFDVGRQKGTLQIGDRFCGYDQNQTASHAYSLWEVVKEGQYHKELGCFVRFISSGDIVSITENRGNQFDQLSYEGLAYPQYADWRKKASKFVSLWQITKKNKKKEIVTVEAKEKFDAICKYQPRLYKFNKEYAYLLRDIVRGKSLVELQQIRQEIFRFIEQDCGVTRLGSLSLSTLETVKAVKGIIYSYFSTALNASKNNPISDEQRKEFDPELFALLEKLELIRTRKKKQKVERIANSLIQTCLENNIKFIRGEGDLSTTNNATKKKANSRSMDWLARGVFNKIRQLAPMHNITLFGCGSLYTSHQDPLVHRNPDKAMKCRWAAIPVKDIGDWVLRKLSQNLRAKNIGTGEYYHQGVKEFLSHYELQDLEEELLKWRSDRKSNIPCWVLQNRLAEKLGNKEAVVYIPVRGGRIYFATHKVATGAVSIVFDQKQVWVCNADHVAAANIALTVKGIGEQSSDEENPDGSRIKLQLTS

SEQ ID NO: 3 - protein, 1054 aa, Artificial Sequence
  Synthetic sequence
MSSAIKSYKSVLRPNERKNQLLKSTIQCLEDGSAFFFKMLQGLFGGITPEIVRFSTEQEKQQQDIALWCAVNWFRPVSQDSLTHTIASDNLVEKFEEYYGGTASDAIKQYFSASIGESYYWNDCRQQYYDLCRELGVEVSDLTHDLEILCREKCLAVATESNQNNSIISVLFGTGEKEDRSVKLRITKKILEAISNLKEIPKNVAPIQEIILNVAKATKETFRQVYAGNLGAPSTLEKFIAKDGQKEFDLKKLQTDLKKVIRGKSKERDWCCQEELRSYVEQNTIQYDLWAWGEMFNKAHTALKIKSTRNYNFAKQRLEQFKEIQSLNNLLVVKKLNDFFDSEFFSGEETYTICVHHLGGKDLSKLYKAWEDDPADPENAIVVLCDDLKNNFKKEPIRNILRYIFTIRQECSAQDILAAAKYNQQLDRYKSQKANPSVLGNQGFTWTNAVILPEKAQRNDRPNSLDLRIWLYLKLRHPDGRWKKHHIPFYDTRFFQEIYAAGNSPVDTCQFRTPRFGYHLPKLTDQTAIRVNKKHVKAAKTEARIRLAIQQGTLPVSNLKITEISATINSKGQVRIPVKFRVGRQKGTLQIGDRFCGYDQNQTASHAYSLWEVVKEGQYHKELGCFVRFISSGDIVSITENRGNQFDQLSYEGLAYPQYADWRKKASKFVSLWQITKKNKKKEIVTVEAKEKFDAICKYQPRLYKFNKEYAYLLRDIVRGKSLVELQQIRQEIFRFIEQDCGVTRLGSLSLSTLETVKAVKGIIYSYFSTALNASKNNPISDEQRKEFDPELFALLEKLELIRTRKKKQKVERIANSLIQTCLENNIKFIRGEGDLSTTNNATKKKANSRSMDWLARGVFNKIRQLAPMHNITLFGCGSLYTSHQDPLVHRNPDKAMKCRWAAIPVKDIGRWVLRKLSQNLRAKNRGTGEYYHQGVKEFLSHYELQDLEEELLKWRSDRKSNIPCWVLQNRLAEKLGNKEAVVYIPVRGGRIYFATHKVATGAVSIVFDQKQVWVCNADHVAAANIALTGKGIGEQSSDEENPDGSRIKLQLTS

SEQ ID NO: 4 - protein, 1054 aa, Artificial Sequence
  Synthetic sequence
MSSAIKSYKSVLRPNERKNQLLKSTIQCLEDGSAFFFKMLQGLFGGITPEIVRFSTEQEKQQQDIALWCAVNWFRPVSQDSLTHTIASDNLVEKFEEYYGGTASDAIKQYFSASIGESYYWNDCRQQYYDLCRELGVEVSDLTHDLEILCREKCLAVATESNQNNSIISVLFGTGEKEDRSVKLRITKKILEAISNLKEIPKNVAPIQEIILNVAKATKETFRQVYAGNLGAPSTLEKFIAKDGQKEFDLKKLQTDLKKVIRGKSKERDWCCQEELRSYVEQNTIQYDLWAWGEMFNKAHTALKIKSTRNYNFAKQRLEQFKEIQSLNNLLVVKKLNDFFDSEFFSGEETYTICVHHLGGKDLSKLYKAWEDDPADPENAIVVLCDDLKNNFKKEPIRNILRYIFTIRQECSAQDILAAAKYNQQLDRYKSQKANPSVLGNQGFTWTNAVILPEKAQRNDRPNSLDLRIWLYLKLRHPDGRWKKHHIPFYDTRFFQEIYAAGNSPVDTCQFRTPRFGYHLPKLTDQTAIRVNKKHVKAAKTEARIRLAIQQGTLPVSNLKITEISATINSKGQVRIPVKFRVGRQKGTLQIGDRFCGYDQNQTASHAYSLWEVVKEGQYHKELGCFVRFISSGDIVSITENRGNQFDQLSYEGLAYPQYADWRKKASKFVSLWQITKKNKKKEIVTVEAKEKFDAICKYQPRLYKFNKEYAYLLRDIVRGKSLVELQQIRQEIFRFIEQDCGVTRLGSLSLSTLETVKAVKGIIYSYFSTALNASKNNPISDEQRKEFDPELFALLEKLELIRTRKKKQKVERIANSLIQTCLENNIKFIRGEGDLSTTNNATKKKANSRSMDWLARGVFNKIRQLAPMHNITLFGCGSLYTSHQDPLVHRNPDKAMKCRWAAIPVKDIGDWVLRKLSQNLRAKNRGTGEYYHQGVKEFLSHYELQDLEEELLKWRSDRKSNIPCWVLQNRLAEKLGNKEAVVYIPVRGGRIYFATHKVATGAVSIVFDQKQVWVCNADHVAAANIALTGKGIGEQSSDEENPDGSRIKLQLTS

SEQ ID NO: 5 - protein, 1054 aa, Artificial Sequence
  Synthetic sequence
MSSAIKSYKSVLRPNERKNQLLKSTIQCLEDGSAFFFKMLQGLFGGITPEIVRFSTEQEKQQQDIALWCAVNWFRPVSQDSLTHTIASDNLVEKFEEYYGGTASDAIKQYFSASIGESYYWNDCRQQYYDLCRELGVEVSDLTHDLEILCREKCLAVATESNQNNSIISVLFGTGEKEDRSVKLRITKKILEAISNLKEIPKNVAPIQEIILNVAKATKETFRQVYAGNLGAPSTLEKFIAKDGQKEFDLKKLQTDLKKVIRGKSKERDWCCQEELRSYVEQNTIQYDLWAWGEMFNKAHTALKIKSTRNYNFAKQRLEQFKEIQSLNNLLVVKKLNDFFDSEFFSGEETYTICVHHLGGKDLSKLYKAWEDDPADPENAIVVLCDDLKNNFKKEPIRNILRYIFTIRQECSAQDILAAAKYNQQLDRYKSQKANPSVLGNQGFTWTNAVILPEKAQRNDRPNSLDLRIWLYLKLRHPDGRWKKHHIPFYDTRFFQEIYAAGNSPVDTCQFRTPRFGYHLPKLTDQTAIRVNKKHVKAAKTEARIRLAIQQGTLPVSNLKITEISATINSKGQVRIPVKFRVGRQKGTLQIGDRFCGYDQNQTASHAYSLWEVVKEGQYHKELGCFVRFISSGDIVSITENRGNQFDQLSYEGLAYPQYADWRKKASKFVSLWQITKKNKKKEIVTVEAKEKFDAICKYQPRLYKFNKEYAYLLRDIVRGKSLVELQQIRQEIFRFIEQDCGVTRLGSLSLSTLETVKAVKGIIYSYFSTALNASKNNPISDEQRKEFDPELFALLEKLELIRTRKKKQKVERIANSLIQTCLENNIKFIRGEGDLSTTNNATKKKANSRSMDWLARGVFNKIRQLAPMHNITLFGCGSLYTSHQDPLVHRNPDKAMKCRWAAIPVKDIGDWVLRKLSQNLRAKNRGTGEYYHQGVKEFLSHYELQDLEEELLKWRSDRKSNIPCWVLQNRLAEKLGNKEAVVYIPVRGGRIYFATHKVATGAVSIVFDQKQVWVCNADHVAAANIALTGKGIGEQSSDEENPDGGRIKLQLTS

SEQ ID NO: 6 - protein, 1054 aa, Artificial Sequence
  Synthetic sequence
MSSAIKSYKSVLRPNERKNQLLKSTIQCLEDGSAFFFKMLQGLFGGITPEIVRFSTEQEKQQQDIALWCAVNWFRPVSQDSLTHTIASDNLVEKFEEYYGGTASDAIKQYFSASIGESYYWNDCRQQYYDLCRELGVEVSDLTHDLEILCREKCLAVATESNQNNSIISVLFGTGEKEDRSVKLRITKKILEAISNLKEIPKNVAPIQEIILNVAKATKETFRQVYAGNLGAPSTLEKFIAKDGQKEFDLKKLQTDLKKVIRGKSKERDWCCQEELRSYVEQNTIQYDLWAWGEMFNKAHTALKIKSTRNYNFAKQRLEQFKEIQSLNNLLVVKKLNDFFDSEFFSGEETYTICVHHLGGKDLSKLYKAWEDDPADPENAIVVLCDDLKNNFKKEPIRNILRYIFTIRQECSAQDILAAAKYNQQLDRYKSQKANPSVLGNQGFTWTNAVILPEKAQRNDRPNSLDLRIWLYLKLRHPDGRWKKHHIPFYDTRFFQEIYAAGNSPVDTCQFRTPRFGYHLPKLTDQTAIRVNKKHVKAAKTEARIRLAIQQGTLPVSNLKITEISATINSKGQVRIPVKFRVGRQKGTLQIGDRFCGYDQNQTASHAYSLWEVVKEGQYHKELGCFVRFISSGDIVSITENRGNQFDQLSYEGLAYPQYADWRKKASKFVSLWQITKKNKKKEIVTVEAKEKFDAICKYQPRLYKFNKEYAYLLRDIVRGKSLVELQQIRQEIFRFIEQDCGVTRLGSLSLSTLETVKAVKGIIYSYFSTALNASKNNPISDEQRKEFDPELFALLEKLELIRTRKKKQKVERIANSLIQTCLENNIKFIRGEGDLSTTNNATKKKANSRSMDWLARGVFNKIRQLAPMHNITLFGCGSLYTSHQDPLVHRNPDKAMKCRWAAIPVKDIGDWVLRKLSQNLRAKNIGTGEYYHQGVKEFLSHYELQDLEEELLKWRSDRKSNIPCWVLQNRLAEKLGNKEAVVYIPVRGGRIYFATHKVATGAVSIVFDQKQVWVCNADHVAAANIALTVKGIGEQSSDEENPDGSRIKLQLTS

SEQ ID NO: 7 - protein, 1054 aa, Artificial Sequence
  Synthetic sequence
MSSAIKSYKSVLRPNERKNQLLKSTIQCLEDGSAFFFKMLQGLFGGITPEIVRFSTEQEKQQQDIALWCAVNWFRPVSQDSLTHTIASDNLVEKFEEYYGGTASDAIKQYFSASIGESYYWNDCRQQYYDLCRELGVEVSDLTHDLEILCREKCLAVATESNQNNSIISVLFGTGEKEDRSVKLRITKKILEAISNLKEIPKNVAPIQEIILNVAKATKETFRQVYAGNLGAPSTLEKFIAKDGQKEFDLKKLQTDLKKVIRGKSKERDWCCQEELRSYVEQNTIQYDLWAWGEMFNKAHTALKIKSTRNYNFAKQRLEQFKEIQSLNNLLVVKKLNDFFDSEFFSGEETYTICVHHLGGKDLSKLYKAWEDDPADPENAIVVLCDDLKNNFKKEPIRNILRYIFTIRQECSAQDILAAAKYNQQLDRYKSQKANPSVLGNQGFTWTNAVILPEKAQRNDRPNSLDLRIWLYLKLRHPDGRWKKHHIPFYDTRFFQEIYAAGNSPVDTCQFRTPRFGYHLPKLTDQTAIRVNKKHVKAAKTEARIRLAIQQGTLPVSNLKITEISATINSKGQVRIPVKFDVGRQKGTRQIGDRFCGYDQNQTASHAYSLWEVVKEGQYHKELGCFVRFISSGDIVSITENRGNQFDQLSYEGLAYPQYADWRKKASKFVSLWQITKKNKKKEIVTVEAKEKFDAICKYQPRLYKFNKEYAYLLRDIVRGKSLVELQQIRQEIFRFIEQDCGVTRLGSLSLSTLETVKAVKGIIYSYFSTALNASKNNPISDEQRKEFDPELFALLEKLELIRTRKKKQKVERIANSLIQTCLENNIKFIRGEGDLSTTNNATKKKANSRSMDWLARGVFNKIRQLAPMHNITLFGCGSLYTSHQDPLVHRNPDKAMKCRWAAIPVKDIGDWVLRKLSQNLRAKNIGTGEYYHQGVKEFLSHYELQDLEEELLKWRSDRKSNIPCWVLQNRLAEKLGNKEAVVYIPVRGGRIYFATHKVATGAVSIVFDQKQVWVCNADHVAAANIALTVKGIGEQSSDEENPDGSRIKLQLTS

SEQ ID NO: 8 - protein, 1054 aa, Artificial Sequence
  Synthetic sequence
MSSAIKSYKSVLRPNERKNQLLKSTIQCLEDGSAFFFKMLQGLFGGITPEIVRFSTEQEKQQQDIALWCAVNWFRPVSQDSLTHTIASDNLVEKFEEYYGGTASDAIKQYFSASIGESYYWNDCRQQYYDLCRELGVEVSDLTHDLEILCREKCLAVATESNQNNSIISVLFGTGEKEDRSVKLRITKKILEAISNLKEIPKNVAPIQEIILNVAKATKETFRQVYAGNLGAPSTLEKFIAKDGQKEFDLKKLQTDLKKVIRGKSKERDWCCQEELRSYVEQNTIQYDLWAWGEMFNKAHTALKIKSTRNYNFAKQRLEQFKEIQSLNNLLVVKKLNDFFDSEFFSGEETYTICVHHLGGKDLSKLYKAWEDDPADPENAIVVLCDDLKNNFKKEPIRNILRYIFTIRQECSAQDILAAAKYNQQLDRYKSQKANPSVLGNQGFTWTNAVILPEKAQRNDRPNSLDLRIWLYLKLRHPDGRWKKHHIPFYDTRFFQEIYAAGNSPVDTCQFRTPRFGYHLPKLTDQTAIRVNKKHVKAAKTEARIRLAIQQGTLPVSNLKITEISATINSKGQVRIPVKFDVGRQKGTLQIGDRFCGYDQNQTASHAYSLWEVVKEGQYHKELGCFVRFISSGDIVSITENRGNQFDQLSYRGLAYPQYADWRKKASKFVSLWQITKKNKKKEIVTVEAKEKFDAICKYQPRLYKFNKEYAYLLRDIVRGKSLVELQQIRQEIFRFIEQDCGVTRLGSLSLSTLETVKAVKGIIYSYFSTALNASKNNPISDEQRKEFDPELFALLEKLELIRTRKKKQKVERIANSLIQTCLENNIKFIRGEGDLSTTNNATKKKANSRSMDWLARGVFNKIRQLAPMHNITLFGCGSLYTSHQDPLVHRNPDKAMKCRWAAIPVKDIGDWVLRKLSQNLRAKNIGTGEYYHQGVKEFLSHYELQDLEEELLKWRSDRKSNIPCWVLQNRLAEKLGNKEAVVYIPVRGGRIYFATHKVATGAVSIVFDQKQVWVCNADHVAAANIALTVKGIGEQSSDEENPDGSRIKLQLTS

SEQ ID NO: 9 - protein, 1054 aa, Artificial Sequence
  Synthetic sequence
MSSAIKSYKSVLRPNERKNQLLKSTIQCLEDGSAFFFKMLQGLFGGITPEIVRFSTEQEKQQQDIALWCAVNWFRPVSQDSLTHTIASDNLVEKFEEYYGGTASDAIKQYFSASIGESYYWNDCRQQYYDLCRELGVEVSDLTHDLEILCREKCLAVATESNQNNSIISVLFGTGEKEDRSVKLRITKKILEAISNLKEIPKNVAPIQEIILNVAKATKETFRQVYAGNLGAPSTLEKFIAKDGQKEFDLKKLQTDLKKVIRGKSKERDWCCQEELRSYVEQNTIQYDLWAWGEMFNKAHTALKIKSTRNYNFAKQRLEQFKEIQSLNNLLVVKKLNDFFDSEFFSGEETYTICVHHLGGKDLSKLYKAWEDDPADPENAIVVLCDDLKNNFKKEPIRNILRYIFTIRQECSAQDILAAAKYNQQLDRYKSQKANPSVLGNQGFTWTNAVILPEKAQRNDRPNSLDLRIWLYLKLRHPDGRWKKHHIPFYDTRFFQEIYAAGNSPVDTCQFRTPRFGYHLPKLTDQTAIRVNKKHVKAAKTEARIRLAIQQGTLPVSNLKITEISATINSKGQVRIPVKFDVGRQKGTLQIGDRFCGYDQNQTASHAYSLWEVVKEGQYHKELGCFVRFISSGDIVSITENRGNQFDQLSYEGLAYPQYADWRKKASKFVSLWQITKKNKKKEIVTVEAKEKFDAICKYQPRLYKFNKEYAYLLRDIVRGKSLVELQQIRQEIFRFIEQDCGVTRLGSLSLSTLETVKAVKGIIYSYFSRALNASKNNPISDEQRKEFDPELFALLEKLELIRTRKKKQKVERIANSLIQTCLENNIKFIRGEGDLSTTNNATKKKANSRSMDWLARGVFNKIRQLAPMHNITLFGCGSLYTSHQDPLVHRNPDKAMKCRWAAIPVKDIGDWVLRKLSQNLRAKNIGTGEYYHQGVKEFLSHYELQDLEEELLKWRSDRKSNIPCWVLQNRLAEKLGNKEAVVYIPVRGGRIYFATHKVATGAVSIVFDQKQVWVCNADHVAAANIALTVKGIGEQSSDEENPDGSRIKLQLTS

SEQ ID NO: 10 - protein, 1054 aa, Artificial Sequence
  Synthetic sequence
MSSAIKSYKSVLRPNERKNQLLKSTIQCLEDGSAFFFKMLQGLFGGITPEIVRFSTEQEKQQQDIALWCAVNWFRPVSQDSLTHTIASDNLVEKFEEYYGGTASDAIKQYFSASIGESYYWNDCRQQYYDLCRELGVEVSDLTHDLEILCREKCLAVATESNQNNSIISVLFGTGEKEDRSVKLRITKKILEAISNLKEIPKNVAPIQEIILNVAKATKETFRQVYAGNLGAPSTLEKFIAKDGQKEFDLKKLQTDLKKVIRGKSKERDWCCQEELRSYVEQNTIQYDLWAWGEMFNKAHTALKIKSTRNYNFAKQRLEQFKEIQSLNNLLVVKKLNDFFDSEFFSGEETYTICVHHLGGKDLSKLYKAWEDDPADPENAIVVLCDDLKNNFKKEPIRNILRYIFTIRQECSAQDILAAAKYNQQLDRYKSQKANPSVLGNQGFTWTNAVILPEKAQRNDRPNSLDLRIWLYLKLRHPDGRWKKHHIPFYDTRFFQEIYAAGNSPVDTCQFRTPRFGYHLPKLTDQTAIRVNKKHVKAAKTEARIRLAIQQGTLPVSNLKITEISATINSKGQVRIPVKFDVGRQKGTLQIGDRFCGYDQNQTASHAYSLWEVVKEGQYHKELGCFVRFISSGDIVSITENRGNQFDQLSYEGLAYPQYADWRKKASKFVSLWQITKKNKKKEIVTVEAKEKFDAICKYQPRLYKFNKEYAYLLRDIVRGKSLVELQQIRQEIFRFIEQDCGVTRLGSLSLSTLETVKAVKGIIYSYFSTALNASKNNPISDEQRKEFDPELFALLEKLELIRTRKKKQKVERIANSLIRTCLENNIKFIRGEGDLSTTNNATKKKANSRSMDWLARGVFNKIRQLAPMHNITLFGCGSLYTSHQDPLVHRNPDKAMKCRWAAIPVKDIGDWVLRKLSQNLRAKNIGTGEYYHQGVKEFLSHYELQDLEEELLKWRSDRKSNIPCWVLQNRLAEKLGNKEAVVYIPVRGGRIYFATHKVATGAVSIVFDQKQVWVCNADHVAAANIALTVKGIGEQSSDEENPDGSRIKLQLTS

SEQ ID NO: 11 - protein, 1054 aa, Artificial Sequence
  Synthetic sequence
MSSAIKSYKSVLRPNERKNQLLKSTIQCLEDGSAFFFKMLQGLFGGITPEIVRFSTEQEKQQQDIALWCAVNWFRPVSQDSLTHTIASDNLVEKFEEYYGGTASDAIKQYFSASIGESYYWNDCRQQYYDLCRELGVEVSDLTHDLEILCREKCLAVATESNQNNSIISVLFGTGEKEDRSVKLRITKKILEAISNLKEIPKNVAPIQEIILNVAKATKETFRQVYAGNLGAPSTLEKFIAKDGQKEFDLKKLQTDLKKVIRGKSKERDWCCQEELRSYVEQNTIQYDLWAWGEMFNKAHTALKIKSTRNYNFAKQRLEQFKEIQSLNNLLVVKKLNDFFDSEFFSGEETYTICVHHLGGKDLSKLYKAWEDDPADPENAIVVLCDDLKNNFKKEPIRNILRYIFTIRQECSAQDILAAAKYNQQLDRYKSQKANPSVLGNQGFTWTNAVILPEKAQRNDRPNSLDLRIWLYLKLRHPDGRWKKHHIPFYDTRFFQEIYAAGNSPVDTCQFRTPRFGYHLPKLTDQTAIRVNKKHVKAAKTEARIRLAIQQGTLPVSNLKITEISATINSKGQVRIPVKFDVGRQKGTLQIGDRFCGYDQNQTASHAYSLWEVVKEGQYHKELGCFVRFISSGDIVSITENRGNQFDQLSYEGLAYPQYADWRKKASKFVSLWQITKKNKKKEIVTVEAKEKFDAICKYQPRLYKFNKEYAYLLRDIVRGKSLVELQQIRQEIFRFIEQDCGVTRLGSLSLSTLETVKAVKGIIYSYFSTALNASKNNPISDEQRKEFDPELFALLEKLELIRTRKKKQKVERIANSLIQTCLENNIKFIRGEGRLSTTNNATKKKANSRSMDWLARGVFNKIRQLAPMHNITLFGCGSLYTSHQDPLVHRNPDKAMKCRWAAIPVKDIGDWVLRKLSQNLRAKNIGTGEYYHQGVKEFLSHYELQDLEEELLKWRSDRKSNIPCWVLQNRLAEKLGNKEAVVYIPVRGGRIYFATHKVATGAVSIVFDQKQVWVCNADHVAAANIALTVKGIGEQSSDEENPDGSRIKLQLTS

SEQ ID NO: 12 - protein, 1054 aa, Artificial Sequence
  Synthetic sequence
MSSAIKSYKSVLRPNERKNQLLKSTIQCLEDGSAFFFKMLQGLFGGITPEIVRFSTEQEKQQQDIALWCAVNWFRPVSQDSLTHTIASDNLVEKFEEYYGGTASDAIKQYFSASIGESYYWNDCRQQYYDLCRELGVEVSDLTHDLEILCREKCLAVATESNQNNSIISVLFGTGEKEDRSVKLRITKKILEAISNLKEIPKNVAPIQEIILNVAKATKETFRQVYAGNLGAPSTLEKFIAKDGQKEFDLKKLQTDLKKVIRGKSKERDWCCQEELRSYVEQNTIQYDLWAWGEMFNKAHTALKIKSTRNYNFAKQRLEQFKEIQSLNNLLVVKKLNDFFDSEFFSGEETYTICVHHLGGKDLSKLYKAWEDDPADPENAIVVLCDDLKNNFKKEPIRNILRYIFTIRQECSAQDILAAAKYNQQLDRYKSQKANPSVLGNQGFTWTNAVILPEKAQRNDRPNSLDLRIWLYLKLRHPDGRWKKHHIPFYDTRFFQEIYAAGNSPVDTCQFRTPRFGYHLPKLTDQTAIRVNKKHVKAAKTEARIRLAIQQGTLPVSNLKITEISATINSKGQVRIPVKFDVGRQKGTLQIGDRFCGYDQNQTASHAYSLWEVVKEGQYHKELGCFVRFISSGDIVSITENRGNQFDQLSYEGLAYPQYADWRKKASKFVSLWQITKKNKKKEIVTVEAKEKFDAICKYQPRLYKFNKEYAYLLRDIVRGKSLVELQQIRQEIFRFIEQDCGVTRLGSLSLSTLETVKAVKGIIYSYFSTALNASKNNPISDEQRKEFDPELFALLEKLELIRTRKKKQKVERIANSLIQTCLENNIKFIRGEGDRSTTNNATKKKANSRSMDWLARGVFNKIRQLAPMHNITLFGCGSLYTSHQDPLVHRNPDKAMKCRWAAIPVKDIGDWVLRKLSQNLRAKNIGTGEYYHQGVKEFLSHYELQDLEEELLKWRSDRKSNIPCWVLQNRLAEKLGNKEAVVYIPVRGGRIYFATHKVATGAVSIVFDQKQVWVCNADHVAAANIALTVKGIGEQSSDEENPDGSRIKLQLTS

SEQ ID NO: 13 - protein, 1054 aa, Artificial Sequence
  Synthetic sequence
MSSAIKSYKSVLRPNERKNQLLKSTIQCLEDGSAFFFKMLQGLFGGITPEIVRFSTEQEKQQQDIALWCAVNWFRPVSQDSLTHTIASDNLVEKFEEYYGGTASDAIKQYFSASIGESYYWNDCRQQYYDLCRELGVEVSDLTHDLEILCREKCLAVATESNQNNSIISVLFGTGEKEDRSVKLRITKKILEAISNLKEIPKNVAPIQEIILNVAKATKETFRQVYAGNLGAPSTLEKFIAKDGQKEFDLKKLQTDLKKVIRGKSKERDWCCQEELRSYVEQNTIQYDLWAWGEMFNKAHTALKIKSTRNYNFAKQRLEQFKEIQSLNNLLVVKKLNDFFDSEFFSGEETYTICVHHLGGKDLSKLYKAWEDDPADPENAIVVLCDDLKNNFKKEPIRNILRYIFTIRQECSAQDILAAAKYNQQLDRYKSQKANPSVLGNQGFTWTNAVILPEKAQRNDRPNSLDLRIWLYLKLRHPDGRWKKHHIPFYDTRFFQEIYAAGNSPVDTCQFRTPRFGYHLPKLTDQTAIRVNKKHVKAAKTEARIRLAIQQGTLPVSNLKITEISATINSKGQVRIPVKFDVGRQKGTLQIGDRFCGYDQNQTASHAYSLWEVVKEGQYHKELGCFVRFISSGDIVSITENRGNQFDQLSYEGLAYPQYADWRKKASKFVSLWQITKKNKKKEIVTVEAKEKFDAICKYQPRLYKFNKEYAYLLRDIVRGKSLVELQQIRQEIFRFIEQDCGVTRLGSLSLSTLETVKAVKGIIYSYFSTALNASKNNPISDEQRKEFDPELFALLEKLELIRTRKKKQKVERIANSLIQTCLENNIKFIRGEGDLSTTNNATKKKANSRSMDWLARGVFNRIRQLAPMHNITLFGCGSLYTSHQDPLVHRNPDKAMKCRWAAIPVKDIGDWVLRKLSQNLRAKNIGTGEYYHQGVKEFLSHYELQDLEEELLKWRSDRKSNIPCWVLQNRLAEKLGNKEAVVYIPVRGGRIYFATHKVATGAVSIVFDQKQVWVCNADHVAAANIALTVKGIGEQSSDEENPDGSRIKLQLTS

SEQ ID NO: 14 - protein, 1054 aa, Artificial Sequence
  Synthetic sequence
MSSAIKSYKSVLRPNERKNQLLKSTIQCLEDGSAFFFKMLQGLFGGITPEIVRFSTEQEKQQQDIALWCAVNWFRPVSQDSLTHTIASDNLVEKFEEYYGGTASDAIKQYFSASIGESYYWNDCRQQYYDLCRELGVEVSDLTHDLEILCREKCLAVATESNQNNSIISVLFGTGEKEDRSVKLRITKKILEAISNLKEIPKNVAPIQEIILNVAKATKETFRQVYAGNLGAPSTLEKFIAKDGQKEFDLKKLQTDLKKVIRGKSKERDWCCQEELRSYVEQNTIQYDLWAWGEMFNKAHTALKIKSTRNYNFAKQRLEQFKEIQSLNNLLVVKKLNDFFDSEFFSGEETYTICVHHLGGKDLSKLYKAWEDDPADPENAIVVLCDDLKNNFKKEPIRNILRYIFTIRQECSAQDILAAAKYNQQLDRYKSQKANPSVLGNQGFTWTNAVILPEKAQRNDRPNSLDLRIWLYLKLRHPDGRWKKHHIPFYDTRFFQEIYAAGNSPVDTCQFRTPRFGYHLPKLTDQTAIRVNKKHVKAAKTEARIRLAIQQGTLPVSNLKITEISATINSKGQVRIPVKFDVGRQKGTLQIGDRFCGYDQNQTASHAYSLWEVVKEGQYHKELGCFVRFISSGDIVSITENRGNQFDQLSYEGLAYPQYADWRKKASKFVSLWQITKKNKKKEIVTVEAKEKFDAICKYQPRLYKFNKEYAYLLRDIVRGKSLVELQQIRQEIFRFIEQDCGVTRLGSLSLSTLETVKAVKGIIYSYFSTALNASKNNPISDEQRKEFDPELFALLEKLELIRTRKKKQKVERIANSLIQTCLENNIKFIRGEGDLSTTNNATKKKANSRSMDWLARGVFNKIRQLARMHNITLFGCGSLYTSHQDPLVHRNPDKAMKCRWAAIPVKDIGDWVLRKLSQNLRAKNIGTGEYYHQGVKEFLSHYELQDLEEELLKWRSDRKSNIPCWVLQNRLAEKLGNKEAVVYIPVRGGRIYFATHKVATGAVSIVFDQKQVWVCNADHVAAANIALTVKGIGEQSSDEENPDGSRIKLQLTS

SEQ ID NO: 15 - protein, 1054 aa, Artificial Sequence
  Synthetic sequence
MSSAIKSYKSVLRPNERKNQLLKSTIQCLEDGSAFFFKMLQGLFGGITPEIVRFSTEQEKQQQDIALWCAVNWFRPVSQDSLTHTIASDNLVEKFEEYYGGTASDAIKQYFSASIGESYYWNDCRQQYYDLCRELGVEVSDLTHDLEILCREKCLAVATESNQNNSIISVLFGTGEKEDRSVKLRITKKILEAISNLKEIPKNVAPIQEIILNVAKATKETFRQVYAGNLGAPSTLEKFIAKDGQKEFDLKKLQTDLKKVIRGKSKERDWCCQEELRSYVEQNTIQYDLWAWGEMFNKAHTALKIKSTRNYNFAKQRLEQFKEIQSLNNLLVVKKLNDFFDSEFFSGEETYTICVHHLGGKDLSKLYKAWEDDPADPENAIVVLCDDLKNNFKKEPIRNILRYIFTIRQECSAQDILAAAKYNQQLDRYKSQKANPSVLGNQGFTWTNAVILPEKAQRNDRPNSLDLRIWLYLKLRHPDGRWKKHHIPFYDTRFFQEIYAAGNSPVDTCQFRTPRFGYHLPKLTDQTAIRVNKKHVKAAKTEARIRLAIQQGTLPVSNLKITEISATINSKGQVRIPVKFDVGRQKGTLQIGDRFCGYDQNQTASHAYSLWEVVKEGQYHKELGCFVRFISSGDIVSITENRGNQFDQLSYEGLAYPQYADWRKKASKFVSLWQITKKNKKKEIVTVEAKEKFDAICKYQPRLYKFNKEYAYLLRDIVRGKSLVELQQIRQEIFRFIEQDCGVTRLGSLSLSTLETVKAVKGIIYSYFSTALNASKNNPISDEQRKEFDPELFALLEKLELIRTRKKKQKVERIANSLIQTCLENNIKFIRGEGDLSTTNNATKKKANSRSMDWLARGVFNKIRQLAPMHNITLFGCGRLYTSHQDPLVHRNPDKAMKCRWAAIPVKDIGDWVLRKLSQNLRAKNIGTGEYYHQGVKEFLSHYELQDLEEELLKWRSDRKSNIPCWVLQNRLAEKLGNKEAVVYIPVRGGRIYFATHKVATGAVSIVFDQKQVWVCNADHVAAANIALTVKGIGEQSSDEENPDGSRIKLQLTS

SEQ ID NO: 16 - protein, 1054 aa, Artificial Sequence
  Synthetic sequence
MSSAIKSYKSVLRPNERKNQLLKSTIQCLEDGSAFFFKMLQGLFGGITPEIVRFSTEQEKQQQDIALWCAVNWFRPVSQDSLTHTIASDNLVEKFEEYYGGTASDAIKQYFSASIGESYYWNDCRQQYYDLCRELGVEVSDLTHDLEILCREKCLAVATESNQNNSIISVLFGTGEKEDRSVKLRITKKILEAISNLKEIPKNVAPIQEIILNVAKATKETFRQVYAGNLGAPSTLEKFIAKDGQKEFDLKKLQTDLKKVIRGKSKERDWCCQEELRSYVEQNTIQYDLWAWGEMFNKAHTALKIKSTRNYNFAKQRLEQFKEIQSLNNLLVVKKLNDFFDSEFFSGEETYTICVHHLGGKDLSKLYKAWEDDPADPENAIVVLCDDLKNNFKKEPIRNILRYIFTIRQECSAQDILAAAKYNQQLDRYKSQKANPSVLGNQGFTWTNAVILPEKAQRNDRPNSLDLRIWLYLKLRHPDGRWKKHHIPFYDTRFFQEIYAAGNSPVDTCQFRTPRFGYHLPKLTDQTAIRVNKKHVKAAKTEARIRLAIQQGTLPVSNLKITEISATINSKGQVRIPVKFDVGRQKGTLQIGDRFCGYDQNQTASHAYSLWEVVKEGQYHKELGCFVRFISSGDIVSITENRGNQFDQLSYEGLAYPQYADWRKKASKFVSLWQITKKNKKKEIVTVEAKEKFDAICKYQPRLYKFNKEYAYLLRDIVRGKSLVELQQIRQEIFRFIEQDCGVTRLGSLSLSTLETVKAVKGIIYSYFSTALNASKNNPISDEQRKEFDPELFALLEKLELIRTRKKKQKVERIANSLIQTCLENNIKFIRGEGDLSTTNNATKKKANSRSMDWLARGVFNKIRQLAPMHNITLFGCGSLYTRHQDPLVHRNPDKAMKCRWAAIPVKDIGDWVLRKLSQNLRAKNIGTGEYYHQGVKEFLSHYELQDLEEELLKWRSDRKSNIPCWVLQNRLAEKLGNKEAVVYIPVRGGRIYFATHKVATGAVSIVFDQKQVWVCNADHVAAANIALTVKGIGEQSSDEENPDGSRIKLQLTS

SEQ ID NO: 17 - protein, 1054 aa, Artificial Sequence
  Synthetic sequence
MSSAIKSYKSVLRPNERKNQLLKSTIQCLEDGSAFFFKMLQGLFGGITPEIVRFSTEQEKQQQDIALWCAVNWFRPVSQDSLTHTIASDNLVEKFEEYYGGTASDAIKQYFSASIGESYYWNDCRQQYYDLCRELGVEVSDLTHDLEILCREKCLAVATESNQNNSIISVLFGTGEKEDRSVKLRITKKILEAISNLKEIPKNVAPIQEIILNVAKATKETFRQVYAGNLGAPSTLEKFIAKDGQKEFDLKKLQTDLKKVIRGKSKERDWCCQEELRSYVEQNTIQYDLWAWGEMFNKAHTALKIKSTRNYNFAKQRLEQFKEIQSLNNLLVVKKLNDFFDSEFFSGEETYTICVHHLGGKDLSKLYKAWEDDPADPENAIVVLCDDLKNNFKKEPIRNILRYIFTIRQECSAQDILAAAKYNQQLDRYKSQKANPSVLGNQGFTWTNAVILPEKAQRNDRPNSLDLRIWLYLKLRHPDGRWKKHHIPFYDTRFFQEIYAAGNSPVDTCQFRTPRFGYHLPKLTDQTAIRVNKKHVKAAKTEARIRLAIQQGTLPVSNLKITEISATINSKGQVRIPVKFDVGRQKGTLQIGDRFCGYDQNQTASHAYSLWEVVKEGQYHKELGCFVRFISSGDIVSITENRGNQFDQLSYEGLAYPQYADWRKKASKFVSLWQITKKNKKKEIVTVEAKEKFDAICKYQPRLYKFNKEYAYLLRDIVRGKSLVELQQIRQEIFRFIEQDCGVTRLGSLSLSTLETVKAVKGIIYSYFSTALNASKNNPISDEQRKEFDPELFALLEKLELIRTRKKKQKVERIANSLIQTCLENNIKFIRGEGDLSTTNNATKKKANSRSMDWLARGVFNKIRQLAPMHNITLFGCGSLYTSHQDPLVHRNPDKAMKCRWAAIPVKDIGRWVLRKLSQNLRAKNIGTGEYYHQGVKEFLSHYELQDLEEELLKWRSDRKSNIPCWVLQNRLAEKLGNKEAVVYIPVRGGRIYFATHKVATGAVSIVFDQKQVWVCNADHVAAANIALTVKGIGEQSSDEENPDGSRIKLQLTS

SEQ ID NO: 18 - protein, 1054 aa, Artificial Sequence
  Synthetic sequence
MSSAIKSYKSVLRPNERKNQLLKSTIQCLEDGSAFFFKMLQGLFGGITPEIVRFSTEQEKQQQDIALWCAVNWFRPVSQDSLTHTIASDNLVEKFEEYYGGTASDAIKQYFSASIGESYYWNDCRQQYYDLCRELGVEVSDLTHDLEILCREKCLAVATESNQNNSIISVLFGTGEKEDRSVKLRITKKILEAISNLKEIPKNVAPIQEIILNVAKATKETFRQVYAGNLGAPSTLEKFIAKDGQKEFDLKKLQTDLKKVIRGKSKERDWCCQEELRSYVEQNTIQYDLWAWGEMFNKAHTALKIKSTRNYNFAKQRLEQFKEIQSLNNLLVVKKLNDFFDSEFFSGEETYTICVHHLGGKDLSKLYKAWEDDPADPENAIVVLCDDLKNNFKKEPIRNILRYIFTIRQECSAQDILAAAKYNQQLDRYKSQKANPSVLGNQGFTWTNAVILPEKAQRNDRPNSLDLRIWLYLKLRHPDGRWKKHHIPFYDTRFFQEIYAAGNSPVDTCQFRTPRFGYHLPKLTDQTAIRVNKKHVKAAKTEARIRLAIQQGTLPVSNLKITEISATINSKGQVRIPVKFDVGRQKGTLQIGDRFCGYDQNQTASHAYSLWEVVKEGQYHKELGCFVRFISSGDIVSITENRGNQFDQLSYEGLAYPQYADWRKKASKFVSLWQITKKNKKKEIVTVEAKEKFDAICKYQPRLYKFNKEYAYLLRDIVRGKSLVELQQIRQEIFRFIEQDCGVTRLGSLSLSTLETVKAVKGIIYSYFSTALNASKNNPISDEQRKEFDPELFALLEKLELIRTRKKKQKVERIANSLIQTCLENNIKFIRGEGDLSTTNNATKKKANSRSMDWLARGVFNKIRQLAPMHNITLFGCGSLYTSHQDPLVHRNPDKAMKCRWAAIPVKDIGDRVLRKLSQNLRAKNIGTGEYYHQGVKEFLSHYELQDLEEELLKWRSDRKSNIPCWVLQNRLAEKLGNKEAVVYIPVRGGRIYFATHKVATGAVSIVFDQKQVWVCNADHVAAANIALTVKGIGEQSSDEENPDGSRIKLQLTS

SEQ ID NO: 19 - protein, 1054 aa, Artificial Sequence
  Synthetic sequence
MSSAIKSYKSVLRPNERKNQLLKSTIQCLEDGSAFFFKMLQGLFGGITPEIVRFSTEQEKQQQDIALWCAVNWFRPVSQDSLTHTIASDNLVEKFEEYYGGTASDAIKQYFSASIGESYYWNDCRQQYYDLCRELGVEVSDLTHDLEILCREKCLAVATESNQNNSIISVLFGTGEKEDRSVKLRITKKILEAISNLKEIPKNVAPIQEIILNVAKATKETFRQVYAGNLGAPSTLEKFIAKDGQKEFDLKKLQTDLKKVIRGKSKERDWCCQEELRSYVEQNTIQYDLWAWGEMFNKAHTALKIKSTRNYNFAKQRLEQFKEIQSLNNLLVVKKLNDFFDSEFFSGEETYTICVHHLGGKDLSKLYKAWEDDPADPENAIVVLCDDLKNNFKKEPIRNILRYIFTIRQECSAQDILAAAKYNQQLDRYKSQKANPSVLGNQGFTWTNAVILPEKAQRNDRPNSLDLRIWLYLKLRHPDGRWKKHHIPFYDTRFFQEIYAAGNSPVDTCQFRTPRFGYHLPKLTDQTAIRVNKKHVKAAKTEARIRLAIQQGTLPVSNLKITEISATINSKGQVRIPVKFDVGRQKGTLQIGDRFCGYDQNQTASHAYSLWEVVKEGQYHKELGCFVRFISSGDIVSITENRGNQFDQLSYEGLAYPQYADWRKKASKFVSLWQITKKNKKKEIVTVEAKEKFDAICKYQPRLYKFNKEYAYLLRDIVRGKSLVELQQIRQEIFRFIEQDCGVTRLGSLSLSTLETVKAVKGIIYSYFSTALNASKNNPISDEQRKEFDPELFALLEKLELIRTRKKKQKVERIANSLIQTCLENNIKFIRGEGDLSTTNNATKKKANSRSMDWLARGVFNKIRQLAPMHNITLFGCGSLYTSHQDPLVHRNPDKAMKCRWAAIPVKDIGDWVLRKLSQNLRAKRIGTGEYYHQGVKEFLSHYELQDLEEELLKWRSDRKSNIPCWVLQNRLAEKLGNKEAVVYIPVRGGRIYFATHKVATGAVSIVFDQKQVWVCNADHVAAANIALTVKGIGEQSSDEENPDGSRIKLQLTS

SEQ ID NO: 20 - protein, 1054 aa, Artificial Sequence
  Synthetic sequence
MSSAIKSYKSVLRPNERKNQLLKSTIQCLEDGSAFFFKMLQGLFGGITPEIVRFSTEQEKQQQDIALWCAVNWFRPVSQDSLTHTIASDNLVEKFEEYYGGTASDAIKQYFSASIGESYYWNDCRQQYYDLCRELGVEVSDLTHDLEILCREKCLAVATESNQNNSIISVLFGTGEKEDRSVKLRITKKILEAISNLKEIPKNVAPIQEIILNVAKATKETFRQVYAGNLGAPSTLEKFIAKDGQKEFDLKKLQTDLKKVIRGKSKERDWCCQEELRSYVEQNTIQYDLWAWGEMFNKAHTALKIKSTRNYNFAKQRLEQFKEIQSLNNLLVVKKLNDFFDSEFFSGEETYTICVHHLGGKDLSKLYKAWEDDPADPENAIVVLCDDLKNNFKKEPIRNILRYIFTIRQECSAQDILAAAKYNQQLDRYKSQKANPSVLGNQGFTWTNAVILPEKAQRNDRPNSLDLRIWLYLKLRHPDGRWKKHHIPFYDTRFFQEIYAAGNSPVDTCQFRTPRFGYHLPKLTDQTAIRVNKKHVKAAKTEARIRLAIQQGTLPVSNLKITEISATINSKGQVRIPVKFDVGRQKGTLQIGDRFCGYDQNQTASHAYSLWEVVKEGQYHKELGCFVRFISSGDIVSITENRGNQFDQLSYEGLAYPQYADWRKKASKFVSLWQITKKNKKKEIVTVEAKEKFDAICKYQPRLYKFNKEYAYLLRDIVRGKSLVELQQIRQEIFRFIEQDCGVTRLGSLSLSTLETVKAVKGIIYSYFSTALNASKNNPISDEQRKEFDPELFALLEKLELIRTRKKKQKVERIANSLIQTCLENNIKFIRGEGDLSTTNNATKKKANSRSMDWLARGVFNKIRQLAPMHNITLFGCGSLYTSHQDPLVHRNPDKAMKCRWAAIPVKDIGDWVLRKLSQNLRAKNRGTGEYYHQGVKEFLSHYELQDLEEELLKWRSDRKSNIPCWVLQNRLAEKLGNKEAVVYIPVRGGRIYFATHKVATGAVSIVFDQKQVWVCNADHVAAANIALTVKGIGEQSSDEENPDGSRIKLQLTS

SEQ ID NO: 21 - protein, 1054 aa, Artificial Sequence
  Synthetic sequence
MSSAIKSYKSVLRPNERKNQLLKSTIQCLEDGSAFFFKMLQGLFGGITPEIVRFSTEQEKQQQDIALWCAVNWFRPVSQDSLTHTIASDNLVEKFEEYYGGTASDAIKQYFSASIGESYYWNDCRQQYYDLCRELGVEVSDLTHDLEILCREKCLAVATESNQNNSIISVLFGTGEKEDRSVKLRITKKILEAISNLKEIPKNVAPIQEIILNVAKATKETFRQVYAGNLGAPSTLEKFIAKDGQKEFDLKKLQTDLKKVIRGKSKERDWCCQEELRSYVEQNTIQYDLWAWGEMFNKAHTALKIKSTRNYNFAKQRLEQFKEIQSLNNLLVVKKLNDFFDSEFFSGEETYTICVHHLGGKDLSKLYKAWEDDPADPENAIVVLCDDLKNNFKKEPIRNILRYIFTIRQECSAQDILAAAKYNQQLDRYKSQKANPSVLGNQGFTWTNAVILPEKAQRNDRPNSLDLRIWLYLKLRHPDGRWKKHHIPFYDTRFFQEIYAAGNSPVDTCQFRTPRFGYHLPKLTDQTAIRVNKKHVKAAKTEARIRLAIQQGTLPVSNLKITEISATINSKGQVRIPVKFDVGRQKGTLQIGDRFCGYDQNQTASHAYSLWEVVKEGQYHKELGCFVRFISSGDIVSITENRGNQFDQLSYEGLAYPQYADWRKKASKFVSLWQITKKNKKKEIVTVEAKEKFDAICKYQPRLYKFNKEYAYLLRDIVRGKSLVELQQIRQEIFRFIEQDCGVTRLGSLSLSTLETVKAVKGIIYSYFSTALNASKNNPISDEQRKEFDPELFALLEKLELIRTRKKKQKVERIANSLIQTCLENNIKFIRGEGDLSTTNNATKKKANSRSMDWLARGVFNKIRQLAPMHNITLFGCGSLYTSHQDPLVHRNPDKAMKCRWAAIPVKDIGDWVLRKLSQNLRAKNIGTGEYYHQGVKEFLSHYELQDLEEELLKWRSDRKSNIPCWVLQNRLAEKLGNKEAVVYIPVRGGRIYFATHKVATGAVSIVFDGKQVWVCNADHVAAANIALTVKGIGEQSSDEENPDGSRIKLQLTS

SEQ ID NO: 22 - protein, 1054 aa, Artificial Sequence
  Synthetic sequence
MSSAIKSYKSVLRPNERKNQLLKSTIQCLEDGSAFFFKMLQGLFGGITPEIVRFSTEQEKQQQDIALWCAVNWFRPVSQDSLTHTIASDNLVEKFEEYYGGTASDAIKQYFSASIGESYYWNDCRQQYYDLCRELGVEVSDLTHDLEILCREKCLAVATESNQNNSIISVLFGTGEKEDRSVKLRITKKILEAISNLKEIPKNVAPIQEIILNVAKATKETFRQVYAGNLGAPSTLEKFIAKDGQKEFDLKKLQTDLKKVIRGKSKERDWCCQEELRSYVEQNTIQYDLWAWGEMFNKAHTALKIKSTRNYNFAKQRLEQFKEIQSLNNLLVVKKLNDFFDSEFFSGEETYTICVHHLGGKDLSKLYKAWEDDPADPENAIVVLCDDLKNNFKKEPIRNILRYIFTIRQECSAQDILAAAKYNQQLDRYKSQKANPSVLGNQGFTWTNAVILPEKAQRNDRPNSLDLRIWLYLKLRHPDGRWKKHHIPFYDTRFFQEIYAAGNSPVDTCQFRTPRFGYHLPKLTDQTAIRVNKKHVKAAKTEARIRLAIQQGTLPVSNLKITEISATINSKGQVRIPVKFDVGRQKGTLQIGDRFCGYDQNQTASHAYSLWEVVKEGQYHKELGCFVRFISSGDIVSITENRGNQFDQLSYEGLAYPQYADWRKKASKFVSLWQITKKNKKKEIVTVEAKEKFDAICKYQPRLYKFNKEYAYLLRDIVRGKSLVELQQIRQEIFRFIEQDCGVTRLGSLSLSTLETVKAVKGIIYSYFSTALNASKNNPISDEQRKEFDPELFALLEKLELIRTRKKKQKVERIANSLIQTCLENNIKFIRGEGDLSTTNNATKKKANSRSMDWLARGVFNKIRQLAPMHNITLFGCGSLYTSHQDPLVHRNPDKAMKCRWAAIPVKDIGDWVLRKLSQNLRAKNIGTGEYYHQGVKEFLSHYELQDLEEELLKWRSDRKSNIPCWVLQNRLAEKLGNKEAVVYIPVRGGRIYFATHKVATGAVSIVFDQKQVWVCNADHVAAANIALTGKGIGEQSSDEENPDGSRIKLQLTS

SEQ ID NO: 23 - protein, 1054 aa, Artificial Sequence
  Synthetic sequence
MSSAIKSYKSVLRPNERKNQLLKSTIQCLEDGSAFFFKMLQGLFGGITPEIVRFSTEQEKQQQDIALWCAVNWFRPVSQDSLTHTIASDNLVEKFEEYYGGTASDAIKQYFSASIGESYYWNDCRQQYYDLCRELGVEVSDLTHDLEILCREKCLAVATESNQNNSIISVLFGTGEKEDRSVKLRITKKILEAISNLKEIPKNVAPIQEIILNVAKATKETFRQVYAGNLGAPSTLEKFIAKDGQKEFDLKKLQTDLKKVIRGKSKERDWCCQEELRSYVEQNTIQYDLWAWGEMFNKAHTALKIKSTRNYNFAKQRLEQFKEIQSLNNLLVVKKLNDFFDSEFFSGEETYTICVHHLGGKDLSKLYKAWEDDPADPENAIVVLCDDLKNNFKKEPIRNILRYIFTIRQECSAQDILAAAKYNQQLDRYKSQKANPSVLGNQGFTWTNAVILPEKAQRNDRPNSLDLRIWLYLKLRHPDGRWKKHHIPFYDTRFFQEIYAAGNSPVDTCQFRTPRFGYHLPKLTDQTAIRVNKKHVKAAKTEARIRLAIQQGTLPVSNLKITEISATINSKGQVRIPVKFRVGRQKGTLQIGDRFCGYDQNQTASHAYSLWEVVKEGQYHKELGCFVRFISSGDIVSITENRGNQFDQLSYEGLAYPQYADWRKKASKFVSLWQITKKNKKKEIVTVEAKEKFDAICKYQPRLYKFNKEYAYLLRDIVRGKSLVELQQIRQEIFRFIEQDCGVTRLGSLSLSTLETVKAVKGIIYSYFSTALNASKNNPISDEQRKEFDPELFALLEKLELIRTRKKKQKVERIANSLIQTCLENNIKFIRGEGDLSTTNNATKKKANSRSMDWLARGVFNKIRQLAPMHNITLFGCGSLYTSHQDPLVHRNPDKAMKCRWAAIPVKDIGRWVLRKLSQNLRAKNRGTGEYYHQGVKEFLSHYELQDLEEELLKWRSDRKSNIPCWVLQNRLAEKLGNKEAVVYIPVRGGRIYFATHKVATGAVSIVFDQKQVWVCNADHVAAANIALTVKGIGEQSSDEENPDGSRIKLQLTS

SEQ ID NO: 24 - protein, 1054 aa, Artificial Sequence
  Synthetic sequence
MSSAIKSYKSVLRPNERKNQLLKSTIQCLEDGSAFFFKMLQGLFGGITPEIVRFSTEQEKQQQDIALWCAVNWFRPVSQDSLTHTIASDNLVEKFEEYYGGTASDAIKQYFSASIGESYYWNDCRQQYYDLCRELGVEVSDLTHDLEILCREKCLAVATESNQNNSIISVLFGTGEKEDRSVKLRITKKILEAISNLKEIPKNVAPIQEIILNVAKATKETFRQVYAGNLGAPSTLEKFIAKDGQKEFDLKKLQTDLKKVIRGKSKERDWCCQEELRSYVEQNTIQYDLWAWGEMFNKAHTALKIKSTRNYNFAKQRLEQFKEIQSLNNLLVVKKLNDFFDSEFFSGEETYTICVHHLGGKDLSKLYKAWEDDPADPENAIVVLCDDLKNNFKKEPIRNILRYIFTIRQECSAQDILAAAKYNQQLDRYKSQKANPSVLGNQGFTWTNAVILPEKAQRNDRPNSLDLRIWLYLKLRHPDGRWKKHHIPFYDTRFFQEIYAAGNSPVDTCQFRTPRFGYHLPKLTDQTAIRVNKKHVKAAKTEARIRLAIQQGTLPVSNLKITEISATINSKGQVRIPVKFDVGRQKGTLQIGDRFCGYDQNQTASHAYSLWEVVKEGQYHKELGCFVRFISSGDIVSITENRGNQFDQLSYEGLAYPQYADWRKKASKFVSLWQITKKNKKKEIVTVEAKEKFDAICKYQPRLYKFNKEYAYLLRDIVRGKSLVELQQIRQEIFRFIEQDCGVTRLGSLSLSTLETVKAVKGIIYSYFSTALNASKNNPISDEQRKEFDPELFALLEKLELIRTRKKKQKVERIANSLIQTCLENNIKFIRGEGDRSTTNNATKKKANSRSMDWLARGVFNKIRQLAPMHNITLFGCGSLYTSHQDPLVHRNPDKAMKCRWAAIPVKDIGRWVLRKLSQNLRAKNIGTGEYYHQGVKEFLSHYELQDLEEELLKWRSDRKSNIPCWVLQNRLAEKLGNKEAVVYIPVRGGRIYFATHKVATGAVSIVFDQKQVWVCNADHVAAANIALTVKGIGEQSSDEENPDGSRIKLQLTS

SEQ ID NO: 25 - protein, 1054 aa, Artificial Sequence
  Synthetic sequence
MSSAIKSYKSVLRPNERKNQLLKSTIQCLEDGSAFFFKMLQGLFGGITPEIVRFSTEQEKQQQDIALWCAVNWFRPVSQDSLTHTIASDNLVEKFEEYYGGTASDAIKQYFSASIGESYYWNDCRQQYYDLCRELGVEVSDLTHDLEILCREKCLAVATESNQNNSIISVLFGTGEKEDRSVKLRITKKILEAISNLKEIPKNVAPIQEIILNVAKATKETFRQVYAGNLGAPSTLEKFIAKDGQKEFDLKKLQTDLKKVIRGKSKERDWCCQEELRSYVEQNTIQYDLWAWGEMFNKAHTALKIKSTRNYNFAKQRLEQFKEIQSLNNLLVVKKLNDFFDSEFFSGEETYTICVHHLGGKDLSKLYKAWEDDPADPENAIVVLCDDLKNNFKKEPIRNILRYIFTIRQECSAQDILAAAKYNQQLDRYKSQKANPSVLGNQGFTWTNAVILPEKAQRNDRPNSLDLRIWLYLKLRHPDGRWKKHHIPFYDTRFFQEIYAAGNSPVDTCQFRTPRFGYHLPKLTDQTAIRVNKKHVKAAKTEARIRLAIQQGTLPVSNLKITEISATINSKGQVRIPVKFRVGRQKGTLQIGDRFCGYDQNQTASHAYSLWEVVKEGQYHKELGCFVRFISSGDIVSITENRGNQFDQLSYEGLAYPQYADWRKKASKFVSLWQITKKNKKKEIVTVEAKEKFDAICKYQPRLYKFNKEYAYLLRDIVRGKSLVELQQIRQEIFRFIEQDCGVTRLGSLSLSTLETVKAVKGIIYSYFSTALNASKNNPISDEQRKEFDPELFALLEKLELIRTRKKKQKVERIANSLIQTCLENNIKFIRGEGDRSTTNNATKKKANSRSMDWLARGVFNKIRQLAPMHNITLFGCGSLYTSHQDPLVHRNPDKAMKCRWAAIPVKDIGRWVLRKLSQNLRAKNRGTGEYYHQGVKEFLSHYELQDLEEELLKWRSDRKSNIPCWVLQNRLAEKLGNKEAVVYIPVRGGRIYFATHKVATGAVSIVFDQKQVWVCNADHVAAANIALTVKGIGEQSSDEENPDGSRIKLQLTS

SEQ ID NO: 26 - protein, 1054 aa, Artificial Sequence
  Synthetic sequence
MSSAIKSYKSVLRPNERKNQLLKSTIQCLEDGSAFFFKMLQGLFGGITPEIVRFSTEQEKQQQDIALWCAVNWFRPVSQDSLTHTIASDNLVEKFEEYYGGTASDAIKQYFSASIGESYYWNDCRQQYYDLCRELGVEVSDLTHDLEILCREKCLAVATESNQNNSIISVLFGTGEKEDRSVKLRITKKILEAISNLKEIPKNVAPIQEIILNVAKATKETFRQVYAGNLGAPSTLEKFIAKDGQKEFDLKKLQTDLKKVIRGKSKERDWCCQEELRSYVEQNTIQYDLWAWGEMFNKAHTALKIKSTRNYNFAKQRLEQFKEIQSLNNLLVVKKLNDFFDSEFFSGEETYTICVHHLGGKDLSKLYKAWEDDPADPENAIVVLCDDLKNNFKKEPIRNILRYIFTIRQECSAQDILAAAKYNQQLDRYKSQKANPSVLGNQGFTWTNAVILPEKAQRNDRPNSLDLRIWLYLKLRHPDGRWKKHHIPFYDTRFFQEIYAAGNSPVDTCQFRTPRFGYHLPKLTDQTAIRVNKKHVKAAKTEARIRLAIQQGTLPVSNLKITEISATINSKGQVRIPVKFRVGRQKGTLQIGDRFCGYDQNQTASHAYSLWEVVKEGQYHKELGCFVRFISSGDIVSITENRGNQFDQLSYEGLAYPQYADWRKKASKFVSLWQITKKNKKKEIVTVEAKEKFDAICKYQPRLYKFNKEYAYLLRDIVRGKSLVELQQIRQEIFRFIEQDCGVTRLGSLSLSTLETVKAVKGIIYSYFSTALNASKNNPISDEQRKEFDPELFALLEKLELIRTRKKKQKVERIANSLIQTCLENNIKFIRGEGDRSTTNNATKKKANSRSMDWLARGVFNKIRQLAPMHNITLFGCGRLYTSHQDPLVHRNPDKAMKCRWAAIPVKDIGDWVLRKLSQNLRAKNIGTGEYYHQGVKEFLSHYELQDLEEELLKWRSDRKSNIPCWVLQNRLAEKLGNKEAVVYIPVRGGRIYFATHKVATGAVSIVFDQKQVWVCNADHVAAANIALTVKGIGEQSSDEENPDGSRIKLQLTS

SEQ ID NO: 27 - protein, 1054 aa, Artificial Sequence
  Synthetic sequence
MSSAIKSYKSVLRPNERKNQLLKSTIQCLEDGSAFFFKMLQGLFGGITPEIVRFSTEQEKQQQDIALWCAVNWFRPVSQDSLTHTIASDNLVEKFEEYYGGTASDAIKQYFSASIGESYYWNDCRQQYYDLCRELGVEVSDLTHDLEILCREKCLAVATESNQNNSIISVLFGTGEKEDRSVKLRITKKILEAISNLKEIPKNVAPIQEIILNVAKATKETFRQVYAGNLGAPSTLEKFIAKDGQKEFDLKKLQTDLKKVIRGKSKERDWCCQEELRSYVEQNTIQYDLWAWGEMFNKAHTALKIKSTRNYNFAKQRLEQFKEIQSLNNLLVVKKLNDFFDSEFFSGEETYTICVHHLGGKDLSKLYKAWEDDPADPENAIVVLCDDLKNNFKKEPIRNILRYIFTIRQECSAQDILAAAKYNQQLDRYKSQKANPSVLGNQGFTWTNAVILPEKAQRNDRPNSLDLRIWLYLKLRHPDGRWKKHHIPFYDTRFFQEIYAAGNSPVDTCQFRTPRFGYHLPKLTDQTAIRVNKKHVKAAKTEARIRLAIQQGTLPVSNLKITEISATINSKGQVRIPVKFRVGRQKGTLQIGDRFCGYDQNQTASHAYSLWEVVKEGQYHKELGCFVRFISSGDIVSITENRGNQFDQLSYEGLAYPQYADWRKKASKFVSLWQITKKNKKKEIVTVEAKEKFDAICKYQPRLYKFNKEYAYLLRDIVRGKSLVELQQIRQEIFRFIEQDCGVTRLGSLSLSTLETVKAVKGIIYSYFSTALNASKNNPISDEQRKEFDPELFALLEKLELIRTRKKKQKVERIANSLIQTCLENNIKFIRGEGDRSTTNNATKKKANSRSMDWLARGVFNKIRQLAPMHNITLFGCGSLYTSHQDPLVHRNPDKAMKCRWAAIPVKDIGRWVLRKLSQNLRAKNIGTGEYYHQGVKEFLSHYELQDLEEELLKWRSDRKSNIPCWVLQNRLAEKLGNKEAVVYIPVRGGRIYFATHKVATGAVSIVFDQKQVWVCNADHVAAANIALTVKGIGEQSSDEENPDGSRIKLQLTS

SEQ ID NO: 28 - protein, 1054 aa, Artificial Sequence
  Synthetic sequence
MSSAIKSYKSVLRPNERKNQLLKSTIQCLEDGSAFFFKMLQGLFGGITPEIVRFSTEQEKQQQDIALWCAVNWFRPVSQDSLTHTIASDNLVEKFEEYYGGTASDAIKQYFSASIGESYYWNDCRQQYYDLCRELGVEVSDLTHDLEILCREKCLAVATESNQNNSIISVLFGTGEKEDRSVKLRITKKILEAISNLKEIPKNVAPIQEIILNVAKATKETFRQVYAGNLGAPSTLEKFIAKDGQKEFDLKKLQTDLKKVIRGKSKERDWCCQEELRSYVEQNTIQYDLWAWGEMFNKAHTALKIKSTRNYNFAKQRLEQFKEIQSLNNLLVVKKLNDFFDSEFFSGEETYTICVHHLGGKDLSKLYKAWEDDPADPENAIVVLCDDLKNNFKKEPIRNILRYIFTIRQECSAQDILAAAKYNQQLDRYKSQKANPSVLGNQGFTWTNAVILPEKAQRNDRPNSLDLRIWLYLKLRHPDGRWKKHHIPFYDTRFFQEIYAAGNSPVDTCQFRTPRFGYHLPKLTDQTAIRVNKKHVKAAKTEARIRLAIQQGTLPVSNLKITEISATINSKGQVRIPVKFRVGRQKGTLQIGDRFCGYDQNQTASHAYSLWEVVKEGQYHKELGCFVRFISSGDIVSITENRGNQFDQLSYEGLAYPQYADWRKKASKFVSLWQITKKNKKKEIVTVEAKEKFDAICKYQPRLYKFNKEYAYLLRDIVRGKSLVELQQIRQEIFRFIEQDCGVTRLGSLSLSTLETVKAVKGIIYSYFSTALNASKNNPISDEQRKEFDPELFALLEKLELIRTRKKKQKVERIANSLIQTCLENNIKFIRGEGDLSTTNNATKKKANSRSMDWLARGVFNKIRQLAPMHNITLFGCGRLYTSHQDPLVHRNPDKAMKCRWAAIPVKDIGDWVLRKLSQNLRAKNIGTGEYYHQGVKEFLSHYELQDLEEELLKWRSDRKSNIPCWVLQNRLAEKLGNKEAVVYIPVRGGRIYFATHKVATGAVSIVFDQKQVWVCNADHVAAANIALTVKGIGEQSSDEENPDGSRIKLQLTS

SEQ ID NO: 29 - protein, 1054 aa, Artificial Sequence
  Synthetic sequence
MSSAIKSYKSVLRPNERKNQLLKSTIQCLEDGSAFFFKMLQGLFGGITPEIVRFSTEQEKQQQDIALWCAVNWFRPVSQDSLTHTIASDNLVEKFEEYYGGTASDAIKQYFSASIGESYYWNDCRQQYYDLCRELGVEVSDLTHDLEILCREKCLAVATESNQNNSIISVLFGTGEKEDRSVKLRITKKILEAISNLKEIPKNVAPIQEIILNVAKATKETFRQVYAGNLGAPSTLEKFIAKDGQKEFDLKKLQTDLKKVIRGKSKERDWCCQEELRSYVEQNTIQYDLWAWGEMFNKAHTALKIKSTRNYNFAKQRLEQFKEIQSLNNLLVVKKLNDFFDSEFFSGEETYTICVHHLGGKDLSKLYKAWEDDPADPENAIVVLCDDLKNNFKKEPIRNILRYIFTIRQECSAQDILAAAKYNQQLDRYKSQKANPSVLGNQGFTWTNAVILPEKAQRNDRPNSLDLRIWLYLKLRHPDGRWKKHHIPFYDTRFFQEIYAAGNSPVDTCQFRTPRFGYHLPKLTDQTAIRVNKKHVKAAKTEARIRLAIQQGTLPVSNLKITEISATINSKGQVRIPVKFDVGRQKGTLQIGDRFCGYDQNQTASHAYSLWEVVKEGQYHKELGCFVRFISSGDIVSITENRGNQFDQLSYEGLAYPQYADWRKKASKFVSLWQITKKNKKKEIVTVEAKEKFDAICKYQPRLYKFNKEYAYLLRDIVRGKSLVELQQIRQEIFRFIEQDCGVTRLGSLSLSTLETVKAVKGIIYSYFSTALNASKNNPISDEQRKEFDPELFALLEKLELIRTRKKKQKVERIANSLIQTCLENNIKFIRGEGDRSTTNNATKKKANSRSMDWLARGVFNKIRQLAPMHNITLFGCGSLYTSHQDPLVHRNPDKAMKCRWAAIPVKDIGRWVLRKLSQNLRAKNRGTGEYYHQGVKEFLSHYELQDLEEELLKWRSDRKSNIPCWVLQNRLAEKLGNKEAVVYIPVRGGRIYFATHKVATGAVSIVFDQKQVWVCNADHVAAANIALTVKGIGEQSSDEENPDGSRIKLQLTS

SEQ ID NO: 30 - protein, 1054 aa, Artificial Sequence
  Synthetic sequence
MSSAIKSYKSVLRPNERKNQLLKSTIQCLEDGSAFFFKMLQGLFGGITPEIVRFSTEQEKQQQDIALWCAVNWFRPVSQDSLTHTIASDNLVEKFEEYYGGTASDAIKQYFSASIGESYYWNDCRQQYYDLCRELGVEVSDLTHDLEILCREKCLAVATESNQNNSIISVLFGTGEKEDRSVKLRITKKILEAISNLKEIPKNVAPIQEIILNVAKATKETFRQVYAGNLGAPSTLEKFIAKDGQKEFDLKKLQTDLKKVIRGKSKERDWCCQEELRSYVEQNTIQYDLWAWGEMFNKAHTALKIKSTRNYNFAKQRLEQFKEIQSLNNLLVVKKLNDFFDSEFFSGEETYTICVHHLGGKDLSKLYKAWEDDPADPENAIVVLCDDLKNNFKKEPIRNILRYIFTIRQECSAQDILAAAKYNQQLDRYKSQKANPSVLGNQGFTWTNAVILPEKAQRNDRPNSLDLRIWLYLKLRHPDGRWKKHHIPFYDTRFFQEIYAAGNSPVDTCQFRTPRFGYHLPKLTDQTAIRVNKKHVKAAKTEARIRLAIQQGTLPVSNLKITEISATINSKGQVRIPVKFRVGRQKGTLQIGDRFCGYDQNQTASHAYSLWEVVKEGQYHKELGCFVRFISSGDIVSITENRGNQFDQLSYEGLAYPQYADWRKKASKFVSLWQITKKNKKKEIVTVEAKEKFDAICKYQPRLYKFNKEYAYLLRDIVRGKSLVELQQIRQEIFRFIEQDCGVTRLGSLSLSTLETVKAVKGIIYSYFSTALNASKNNPISDEQRKEFDPELFALLEKLELIRTRKKKQKVERIANSLIQTCLENNIKFIRGEGDRSTTNNATKKKANSRSMDWLARGVFNKIRQLAPMHNITLFGCGRLYTSHQDPLVHRNPDKAMKCRWAAIPVKDIGRWVLRKLSQNLRAKNIGTGEYYHQGVKEFLSHYELQDLEEELLKWRSDRKSNIPCWVLQNRLAEKLGNKEAVVYIPVRGGRIYFATHKVATGAVSIVFDQKQVWVCNADHVAAANIALTVKGIGEQSSDEENPDGSRIKLQLTS

SEQ ID NO: 31 - protein, 1054 aa, Artificial Sequence
  Synthetic sequence
MSSAIKSYKSVLRPNERKNQLLKSTIQCLEDGSAFFFKMLQGLFGGITPEIVRFSTEQEKQQQDIALWCAVNWFRPVSQDSLTHTIASDNLVEKFEEYYGGTASDAIKQYFSASIGESYYWNDCRQQYYDLCRELGVEVSDLTHDLEILCREKCLAVATESNQNNSIISVLFGTGEKEDRSVKLRITKKILEAISNLKEIPKNVAPIQEIILNVAKATKETFRQVYAGNLGAPSTLEKFIAKDGQKEFDLKKLQTDLKKVIRGKSKERDWCCQEELRSYVEQNTIQYDLWAWGEMFNKAHTALKIKSTRNYNFAKQRLEQFKEIQSLNNLLVVKKLNDFFDSEFFSGEETYTICVHHLGGKDLSKLYKAWEDDPADPENAIVVLCDDLKNNFKKEPIRNILRYIFTIRQECSAQDILAAAKYNQQLDRYKSQKANPSVLGNQGFTWTNAVILPEKAQRNDRPNSLDLRIWLYLKLRHPDGRWKKHHIPFYDTRFFQEIYAAGNSPVDTCQFRTPRFGYHLPKLTDQTAIRVNKKHVKAAKTEARIRLAIQQGTLPVSNLKITEISATINSKGQVRIPVKFDVGRQKGTRQIGDRFCGYDQNQTASHAYSLWEVVKEGQYHKELGCFVRFISSGDIVSITENRGNQFDQLSYEGLAYPQYADWRKKASKFVSLWQITKKNKKKEIVTVEAKEKFDAICKYQPRLYKFNKEYAYLLRDIVRGKSLVELQQIRQEIFRFIEQDCGVTRLGSLSLSTLETVKAVKGIIYSYFSTALNASKNNPISDEQRKEFDPELFALLEKLELIRTRKKKQKVERIANSLIQTCLENNIKFIRGEGDRSTTNNATKKKANSRSMDWLARGVFNKIRQLAPMHNITLFGCGRLYTSHQDPLVHRNPDKAMKCRWAAIPVKDIGRWVLRKLSQNLRAKNIGTGEYYHQGVKEFLSHYELQDLEEELLKWRSDRKSNIPCWVLQNRLAEKLGNKEAVVYIPVRGGRIYFATHKVATGAVSIVFDQKQVWVCNADHVAAANIALTVKGIGEQSSDEENPDGSRIKLQLTS

SEQ ID NO: 32 - protein, 1054 aa, Artificial Sequence
  Synthetic sequence
MSSAIKSYKSVLRPNERKNQLLKSTIQCLEDGSAFFFKMLQGLFGGITPEIVRFSTEQEKQQQDIALWCAVNWFRPVSQDSLTHTIASDNLVEKFEEYYGGTASDAIKQYFSASIGESYYWNDCRQQYYDLCRELGVEVSDLTHDLEILCREKCLAVATESNQNNSIISVLFGTGEKEDRSVKLRITKKILEAISNLKEIPKNVAPIQEIILNVAKATKETFRQVYAGNLGAPSTLEKFIAKDGQKEFDLKKLQTDLKKVIRGKSKERDWCCQEELRSYVEQNTIQYDLWAWGEMFNKAHTALKIKSTRNYNFAKQRLEQFKEIQSLNNLLVVKKLNDFFDSEFFSGEETYTICVHHLGGKDLSKLYKAWEDDPADPENAIVVLCDDLKNNFKKEPIRNILRYIFTIRQECSAQDILAAAKYNQQLDRYKSQKANPSVLGNQGFTWTNAVILPEKAQRNDRPNSLDLRIWLYLKLRHPDGRWKKHHIPFYDTRFFQEIYAAGNSPVDTCQFRTPRFGYHLPKLTDQTAIRVNKKHVKAAKTEARIRLAIQQGTLPVSNLKITEISATINSKGQVRIPVKFRVGRQKGTLQIGDRFCGYDQNQTASHAYSLWEVVKEGQYHKELGCFVRFISSGDIVSITENRGNQFDQLSYEGLAYPQYADWRKKASKFVSLWQITKKNKKKEIVTVEAKEKFDAICKYQPRLYKFNKEYAYLLRDIVRGKSLVELQQIRQEIFRFIEQDCGVTRLGSLSLSTLETVKAVKGIIYSYFSTALNASKNNPISDEQRKEFDPELFALLEKLELIRTRKKKQKVERIANSLIQTCLENNIKFIRGEGGLSTTNNATKKKANSRSMDWLARGVFNKIRQLAPMHNITLFGCGSLYTSHQDPLVHRNPDKAMKCRWAAIPVKDIGRWVLRKLSQNLRAKNRGTGEYYHQGVKEFLSHYELQDLEEELLKWRSDRKSNIPCWVLQNRLAEKLGNKEAVVYIPVRGGRIYFATHKVATGAVSIVFDQKQVWVCNADHVAAANIALTVKGIGEQSSDEENPDGSRIKLQLTS

SEQ ID NO: 33 - protein, 1054 aa, Artificial Sequence; identical to SEQ ID NO: 3
  Synthetic sequence

SEQ ID NO: 34 - protein, 1054 aa, Artificial Sequence
  Synthetic sequence
MSSAIKSYKSVLRPNERKNQLLKSTIQCLEDGSAFFFKMLQGLFGGITPEIVRFSTEQEKQQQDIALWCAVNWFRPVSQDSLTHTIASDNLVEKFEEYYGGTASDAIKQYFSASIGESYYWNDCRQQYYDLCRELGVEVSDLTHDLEILCREKCLAVATESNQNNSIISVLFGTGEKEDRSVKLRITKKILEAISNLKEIPKNVAPIQEIILNVAKATKETFRQVYAGNLGAPSTLEKFIAKDGQKEFDLKKLQTDLKKVIRGKSKERDWCCQEELRSYVEQNTIQYDLWAWGEMFNKAHTALKIKSTRNYNFAKQRLEQFKEIQSLNNLLVVKKLNDFFDSEFFSGEETYTICVHHLGGKDLSKLYKAWEDDPADPENAIVVLCDDLKNNFKKEPIRNILRYIFTIRQECSAQDILAAAKYNQQLDRYKSQKANPSVLGNQGFTWTNAVILPEKAQRNDRPNSLDLRIWLYLKLRHPDGRWKKHHIPFYDTRFFQEIYAAGNSPVDTCQFRTPRFGYHLPKLTDQTAIRVNKKHVKAAKTEARIRLAIQQGTLPVSNLKITEISATINSKGQVRIPVKFRVGRQKGTLQIGDRFCGYDQNQTASHAYSLWEVVKEGQYHKELGCFVRFISSGDIVSITENRGNQFDQLSYEGLAYPQYADWRKKASKFVSLWQITKKNKKKEIVTVEAKEKFDAICKYQPRLYKFNKEYAYLLRDIVRGKSLVELQQIRQEIFRFIEQDCGVTRLGSLSLSTLETVKAVKGIIYSYFSTALNASKNNPISDEQRKEFDPELFALLEKLELIRTRKKKQKVERIANSLIQTCLENNIKFIRGEGDLSTTNNATKKKANSRSMDWLARGVFNKIRQLAPMHNITLFGCGSLYTSHQDPLVHRNPDKAMKCRWAAIPVKDIGRWVLRKLSQNLRAKNRGTGEYYHQGVKEFLSHYELQDLEEELLKWRSDRKSNIPCWVLQNRLAEKLGNKEAVVYIPVRGGRIYFATHKVATGAVSIVFDQKQVWVCNADHVAAANIALTVKGIGEQSSDEENPDGGRIKLQLTS

SEQ ID NO: 35 - protein, 1054 aa, Artificial Sequence
  Synthetic sequence
MSSAIKSYKSVLRPNERKNQLLKSTIQCLEDGSAFFFKMLQGLFGGITPEIVRFSTEQEKQQQDIALWCAVNWFRPVSQDSLTHTIASDNLVEKFEEYYGGTASDAIKQYFSASIGESYYWNDCRQQYYDLCRELGVEVSDLTHDLEILCREKCLAVATESNQNNSIISVLFGTGEKEDRSVKLRITKKILEAISNLKEIPKNVAPIQEIILNVAKATKETFRQVYAGNLGAPSTLEKFIAKDGQKEFDLKKLQTDLKKVIRGKSKERDWCCQEELRSYVEQNTIQYDLWAWGEMFNKAHTALKIKSTRNYNFAKQRLEQFKEIQSLNNLLVVKKLNDFFDSEFFSGEETYTICVHHLGGKDLSKLYKAWEDDPADPENAIVVLCDDLKNNFKKEPIRNILRYIFTIRQECSAQDILAAAKYNQQLDRYKSQKANPSVLGNQGFTWTNAVILPEKAQRNDRPNSLDLRIWLYLKLRHPDGRWKKHHIPFYDTRFFQEIYAAGNSPVDTCQFRTPRFGYHLPKLTDQTAIRVNKKHVKAAKTEARIRLAIQQGTLPVSNLKITEISATINSKGQVRIPVKFDVGRQKGTLQIGDRFCGYDQNQTASHAYSLWEVVKEGQYHKELGCFVRFISSGDIVSITENRGNQFDQLSYEGLAYPQYADWRKKASKFVSLWQITKKNKKKEIVTVEAKEKFDAICKYQPRLYKFNKEYAYLLRDIVRGKSLVELQQIRQEIFRFIEQDCGVTRLGSLSLSTLETVKAVKGIIYSYFSTALNASKNNPISDEQRKEFDPELFALLEKLELIRTRKKKQKVERIANSLIQTCLENNIKFIRGEGGRSTTNNATKKKANSRSMDWLARGVFNKIRQLAPMHNITLFGCGSLYTSHQDPLVHRNPDKAMKCRWAAIPVKDIGRWVLRKLSQNLRAKNIGTGEYYHQGVKEFLSHYELQDLEEELLKWRSDRKSNIPCWVLQNRLAEKLGNKEAVVYIPVRGGRIYFATHKVATGAVSIVFDQKQVWVCNADHVAAANIALTVKGIGEQSSDEENPDGSRIKLQLTS

SEQ ID NO: 36 - protein, 1054 aa, Artificial Sequence
  Synthetic sequence
MSSAIKSYKSVLRPNERKNQLLKSTIQCLEDGSAFFFKMLQGLFGGITPEIVRFSTEQEKQQQDIALWCAVNWFRPVSQDSLTHTIASDNLVEKFEEYYGGTASDAIKQYFSASIGESYYWNDCRQQYYDLCRELGVEVSDLTHDLEILCREKCLAVATESNQNNSIISVLFGTGEKEDRSVKLRITKKILEAISNLKEIPKNVAPIQEIILNVAKATKETFRQVYAGNLGAPSTLEKFIAKDGQKEFDLKKLQTDLKKVIRGKSKERDWCCQEELRSYVEQNTIQYDLWAWGEMFNKAHTALKIKSTRNYNFAKQRLEQFKEIQSLNNLLVVKKLNDFFDSEFFSGEETYTICVHHLGGKDLSKLYKAWEDDPADPENAIVVLCDDLKNNFKKEPIRNILRYIFTIRQECSAQDILAAAKYNQQLDRYKSQKANPSVLGNQGFTWTNAVILPEKAQRNDRPNSLDLRIWLYLKLRHPDGRWKKHHIPFYDTRFFQEIYAAGNSPVDTCQFRTPRFGYHLPKLTDQTAIRVNKKHVKAAKTEARIRLAIQQGTLPVSNLKITEISATINSKGQVRIPVKFDVGRQKGTLQIGDRFCGYDQNQTASHAYSLWEVVKEGQYHKELGCFVRFISSGDIVSITENRGNQFDQLSYEGLAYPQYADWRKKASKFVSLWQITKKNKKKEIVTVEAKEKFDAICKYQPRLYKFNKEYAYLLRDIVRGKSLVELQQIRQEIFRFIEQDCGVTRLGSLSLSTLETVKAVKGIIYSYFSTALNASKNNPISDEQRKEFDPELFALLEKLELIRTRKKKQKVERIANSLIQTCLENNIKFIRGEGDRSTTNNATKKKANSRSMDWLARGVFNKIRQLAPMHNITLFGCGSLYTSHQDPLVHRNPDKAMKCRWAAIPVKDIGRWVLRKLSQNLRAKNIGTGEYYHQGVKEFLSHYELQDLEEELLKWRSDRKSNIPCWVLQNRLAEKLGNKEAVVYIPVRGGRIYFATHKVATGAVSIVFDQKQVWVCNADHVAAANIALTGKGIGEQSSDEENPDGSRIKLQLTS

SEQ ID NO: 37 - protein, 1054 aa, Artificial Sequence
  Synthetic sequence
MSSAIKSYKSVLRPNERKNQLLKSTIQCLEDGSAFFFKMLQGLFGGITPEIVRFSTEQEKQQQDIALWCAVNWFRPVSQDSLTHTIASDNLVEKFEEYYGGTASDAIKQYFSASIGESYYWNDCRQQYYDLCRELGVEVSDLTHDLEILCREKCLAVATESNQNNSIISVLFGTGEKEDRSVKLRITKKILEAISNLKEIPKNVAPIQEIILNVAKATKETFRQVYAGNLGAPSTLEKFIAKDGQKEFDLKKLQTDLKKVIRGKSKERDWCCQEELRSYVEQNTIQYDLWAWGEMFNKAHTALKIKSTRNYNFAKQRLEQFKEIQSLNNLLVVKKLNDFFDSEFFSGEETYTICVHHLGGKDLSKLYKAWEDDPADPENAIVVLCDDLKNNFKKEPIRNILRYIFTIRQECSAQDILAAAKYNQQLDRYKSQKANPSVLGNQGFTWTNAVILPEKAQRNDRPNSLDLRIWLYLKLRHPDGRWKKHHIPFYDTRFFQEIYAAGNSPVDTCQFRTPRFGYHLPKLTDQTAIRVNKKHVKAAKTEARIRLAIQQGTLPVSNLKITEISATINSKGQVRIPVKFDVGRQKGTLQIGDRFCGYDQNQTASHAYSLWEVVKEGQYHKELGCFVRFISSGDIVSITENRGNQFDQLSYEGLAYPQYADWRKKASKFVSLWQITKKNKKKEIVTVEAKEKFDAICKYQPRLYKFNKEYAYLLRDIVRGKSLVELQQIRQEIFRFIEQDCGVTRLGSLSLSTLETVKAVKGIIYSYFSTALNASKNNPISDEQRKEFDPELFALLEKLELIRTRKKKQKVERIANSLIQTCLENNIKFIRGEGDRSTTNNATKKKANSRSMDWLARGVFNKIRQLAPMHNITLFGCGSLYTSHQDPLVHRNPDKAMKCRWAAIPVKDIGRWVLRKLSQNLRAKNIGTGEYYHQGVKEFLSHYELQDLEEELLKWRSDRKSNIPCWVLQNRLAEKLGNKEAVVYIPVRGGRIYFATHKVATGAVSIVFDQKQVWVCNADHVAAANIALTVKGIGEQSSDEENPDGGRIKLQLTS

SEQ ID NO: 38 - protein, 1054 aa, Artificial Sequence
  Synthetic sequence
MSSAIKSYKSVLRPNERKNQLLKSTIQCLEDGSAFFFKMLQGLFGGITPEIVRFSTEQEKQQQDIALWCAVNWFRPVSQDSLTHTIASDNLVEKFEEYYGGTASDAIKQYFSASIGESYYWNDCRQQYYDLCRELGVEVSDLTHDLEILCREKCLAVATESNQNNSIISVLFGTGEKEDRSVKLRITKKILEAISNLKEIPKNVAPIQEIILNVAKATKETFRQVYAGNLGAPSTLEKFIAKDGQKEFDLKKLQTDLKKVIRGKSKERDWCCQEELRSYVEQNTIQYDLWAWGEMFNKAHTALKIKSTRNYNFAKQRLEQFKEIQSLNNLLVVKKLNDFFDSEFFSGEETYTICVHHLGGKDLSKLYKAWEDDPADPENAIVVLCDDLKNNFKKEPIRNILRYIFTIRQECSAQDILAAAKYNQQLDRYKSQKANPSVLGNQGFTWTNAVILPEKAQRNDRPNSLDLRIWLYLKLRHPDGRWKKHHIPFYDTRFFQEIYAAGNSPVDTCQFRTPRFGYHLPKLTDQTAIRVNKKHVKAAKTEARIRLAIQQGTLPVSNLKITEISATINSKGQVRIPVKFRVGRQKGTLQIGDRFCGYDQNQTASHAYSLWEVVKEGQYHKELGCFVRFISSGDIVSITENRGNQFDQLSYEGLAYPQYADWRKKASKFVSLWQITKKNKKKEIVTVEAKEKFDAICKYQPRLYKFNKEYAYLLRDIVRGKSLVELQQIRQEIFRFIEQDCGVTRLGSLSLSTLETVKAVKGIIYSYFSTALNASKNNPISDEQRKEFDPELFALLEKLELIRTRKKKQKVERIANSLIQTCLENNIKFIRGEGGRSTTNNATKKKANSRSMDWLARGVFNKIRQLAPMHNITLFGCGSLYTSHQDPLVHRNPDKAMKCRWAAIPVKDIGRWVLRKLSQNLRAKNRGTGEYYHQGVKEFLSHYELQDLEEELLKWRSDRKSNIPCWVLQNRLAEKLGNKEAVVYIPVRGGRIYFATHKVATGAVSIVFDQKQVWVCNADHVAAANIALTVKGIGEQSSDEENPDGSRIKLQLTS

SEQ ID NO: 39 - protein, 1054 aa, Artificial Sequence
  Synthetic sequence
MSSAIKSYKSVLRPNERKNQLLKSTIQCLEDGSAFFFKMLQGLFGGITPEIVRFSTEQEKQQQDIALWCAVNWFRPVSQDSLTHTIASDNLVEKFEEYYGGTASDAIKQYFSASIGESYYWNDCRQQYYDLCRELGVEVSDLTHDLEILCREKCLAVATESNQNNSIISVLFGTGEKEDRSVKLRITKKILEAISNLKEIPKNVAPIQEIILNVAKATKETFRQVYAGNLGAPSTLEKFIAKDGQKEFDLKKLQTDLKKVIRGKSKERDWCCQEELRSYVEQNTIQYDLWAWGEMFNKAHTALKIKSTRNYNFAKQRLEQFKEIQSLNNLLVVKKLNDFFDSEFFSGEETYTICVHHLGGKDLSKLYKAWEDDPADPENAIVVLCDDLKNNFKKEPIRNILRYIFTIRQECSAQDILAAAKYNQQLDRYKSQKANPSVLGNQGFTWTNAVILPEKAQRNDRPNSLDLRIWLYLKLRHPDGRWKKHHIPFYDTRFFQEIYAAGNSPVDTCQFRTPRFGYHLPKLTDQTAIRVNKKHVKAAKTEARIRLAIQQGTLPVSNLKITEISATINSKGQVRIPVKFRVGRQKGTLQIGDRFCGYDQNQTASHAYSLWEVVKEGQYHKELGCFVRFISSGDIVSITENRGNQFDQLSYEGLAYPQYADWRKKASKFVSLWQITKKNKKKEIVTVEAKEKFDAICKYQPRLYKFNKEYAYLLRDIVRGKSLVELQQIRQEIFRFIEQDCGVTRLGSLSLSTLETVKAVKGIIYSYFSTALNASKNNPISDEQRKEFDPELFALLEKLELIRTRKKKQKVERIANSLIQTCLENNIKFIRGEGDRSTTNNATKKKANSRSMDWLARGVFNKIRQLAPMHNITLFGCGSLYTSHQDPLVHRNPDKAMKCRWAAIPVKDIGRWVLRKLSQNLRAKNRGTGEYYHQGVKEFLSHYELQDLEEELLKWRSDRKSNIPCWVLQNRLAEKLGNKEAVVYIPVRGGRIYFATHKVATGAVSIVFDQKQVWVCNADHVAAANIALTGKGIGEQSSDEENPDGSRIKLQLTS

SEQ ID NO: 40 - protein, 1054 aa, Artificial Sequence
  Synthetic sequence
MSSAIKSYKSVLRPNERKNQLLKSTIQCLEDGSAFFFKMLQGLFGGITPEIVRFSTEQEKQQQDIALWCAVNWFRPVSQDSLTHTIASDNLVEKFEEYYGGTASDAIKQYFSASIGESYYWNDCRQQYYDLCRELGVEVSDLTHDLEILCREKCLAVATESNQNNSIISVLFGTGEKEDRSVKLRITKKILEAISNLKEIPKNVAPIQEIILNVAKATKETFRQVYAGNLGAPSTLEKFIAKDGQKEFDLKKLQTDLKKVIRGKSKERDWCCQEELRSYVEQNTIQYDLWAWGEMFNKAHTALKIKSTRNYNFAKQRLEQFKEIQSLNNLLVVKKLNDFFDSEFFSGEETYTICVHHLGGKDLSKLYKAWEDDPADPENAIVVLCDDLKNNFKKEPIRNILRYIFTIRQECSAQDILAAAKYNQQLDRYKSQKANPSVLGNQGFTWTNAVILPEKAQRNDRPNSLDLRIWLYLKLRHPDGRWKKHHIPFYDTRFFQEIYAAGNSPVDTCQFRTPRFGYHLPKLTDQTAIRVNKKHVKAAKTEARIRLAIQQGTLPVSNLKITEISATINSKGQVRIPVKFRVGRQKGTLQIGDRFCGYDQNQTASHAYSLWEVVKEGQYHKELGCFVRFISSGDIVSITENRGNQFDQLSYEGLAYPQYADWRKKASKFVSLWQITKKNKKKEIVTVEAKEKFDAICKYQPRLYKFNKEYAYLLRDIVRGKSLVELQQIRQEIFRFIEQDCGVTRLGSLSLSTLETVKAVKGIIYSYFSTALNASKNNPISDEQRKEFDPELFALLEKLELIRTRKKKQKVERIANSLIQTCLENNIKFIRGEGDRSTTNNATKKKANSRSMDWLARGVFNKIRQLAPMHNITLFGCGSLYTSHQDPLVHRNPDKAMKCRWAAIPVKDIGRWVLRKLSQNLRAKNRGTGEYYHQGVKEFLSHYELQDLEEELLKWRSDRKSNIPCWVLQNRLAEKLGNKEAVVYIPVRGGRIYFATHKVATGAVSIVFDQKQVWVCNADHVAAANIALTVKGIGEQSSDEENPDGGRIKLQLTS

SEQ ID NO: 41 - protein, 1054 aa, Artificial Sequence
  Synthetic sequence
MSSAIKSYKSVLRPNERKNQLLKSTIQCLEDGSAFFFKMLQGLFGGITPEIVRFSTEQEKQQQDIALWCAVNWFRPVSQDSLTHTIASDNLVEKFEEYYGGTASDAIKQYFSASIGESYYWNDCRQQYYDLCRELGVEVSDLTHDLEILCREKCLAVATESNQNNSIISVLFGTGEKEDRSVKLRITKKILEAISNLKEIPKNVAPIQEIILNVAKATKETFRQVYAGNLGAPSTLEKFIAKDGQKEFDLKKLQTDLKKVIRGKSKERDWCCQEELRSYVEQNTIQYDLWAWGEMFNKAHTALKIKSTRNYNFAKQRLEQFKEIQSLNNLLVVKKLNDFFDSEFFSGEETYTICVHHLGGKDLSKLYKAWEDDPADPENAIVVLCDDLKNNFKKEPIRNILRYIFTIRQECSAQDILAAAKYNQQLDRYKSQKANPSVLGNQGFTWTNAVILPEKAQRNDRPNSLDLRIWLYLKLRHPDGRWKKHHIPFYDTRFFQEIYAAGNSPVDTCQFRTPRFGYHLPKLTDQTAIRVNKKHVKAAKTEARIRLAIQQGTLPVSNLKITEISATINSKGQVRIPVKFRVGRQKGTLQIGDRFCGYDQNQTASHAYSLWEVVKEGQYHKELGCFVRFISSGDIVSITENRGNQFDQLSYEGLAYPQYADWRKKASKFVSLWQITKKNKKKEIVTVEAKEKFDAICKYQPRLYKFNKEYAYLLRDIVRGKSLVELQQIRQEIFRFIEQDCGVTRLGSLSLSTLETVKAVKGIIYSYFSTALNASKNNPISDEQRKEFDPELFALLEKLELIRTRKKKQKVERIANSLIQTCLENNIKFIRGEGGLSTTNNATKKKANSRSMDWLARGVFNKIRQLAPMHNITLFGCGRLYTSHQDPLVHRNPDKAMKCRWAAIPVKDIGDWVLRKLSQNLRAKNIGTGEYYHQGVKEFLSHYELQDLEEELLKWRSDRKSNIPCWVLQNRLAEKLGNKEAVVYIPVRGGRIYFATHKVATGAVSIVFDQKQVWVCNADHVAAANIALTVKGIGEQSSDEENPDGSRIKLQLTS

SEQ ID NO: 42 - protein, 1054 aa, Artificial Sequence; identical to SEQ ID NO: 39
  Synthetic sequence

SEQ ID NO: 43 - protein, 1054 aa, Artificial Sequence
  Synthetic sequence
MSSAIKSYKSVLRPNERKNQLLKSTIQCLEDGSAFFFKMLQGLFGGITPEIVRFSTEQEKQQQDIALWCAVNWFRPVSQDSLTHTIASDNLVEKFEEYYGGTASDAIKQYFSASIGESYYWNDCRQQYYDLCRELGVEVSDLTHDLEILCREKCLAVATESNQNNSIISVLFGTGEKEDRSVKLRITKKILEAISNLKEIPKNVAPIQEIILNVAKATKETFRQVYAGNLGAPSTLEKFIAKDGQKEFDLKKLQTDLKKVIRGKSKERDWCCQEELRSYVEQNTIQYDLWAWGEMFNKAHTALKIKSTRNYNFAKQRLEQFKEIQSLNNLLVVKKLNDFFDSEFFSGEETYTICVHHLGGKDLSKLYKAWEDDPADPENAIVVLCDDLKNNFKKEPIRNILRYIFTIRQECSAQDILAAAKYNQQLDRYKSQKANPSVLGNQGFTWTNAVILPEKAQRNDRPNSLDLRIWLYLKLRHPDGRWKKHHIPFYDTRFFQEIYAAGNSPVDTCQFRTPRFGYHLPKLTDQTAIRVNKKHVKAAKTEARIRLAIQQGTLPVSNLKITEISATINSKGQVRIPVKFRVGRQKGTLQIGDRFCGYDQNQTASHAYSLWEVVKEGQYHKELGCFVRFISSGDIVSITENRGNQFDQLSYEGLAYPQYADWRKKASKFVSLWQITKKNKKKEIVTVEAKEKFDAICKYQPRLYKFNKEYAYLLRDIVRGKSLVELQQIRQEIFRFIEQDCGVTRLGSLSLSTLETVKAVKGIIYSYFSTALNASKNNPISDEQRKEFDPELFALLEKLELIRTRKKKQKVERIANSLIQTCLENNIKFIRGEGDRSTTNNATKKKANSRSMDWLARGVFNKIRQLAPMHNITLFGCGRLYTSHQDPLVHRNPDKAMKCRWAAIPVKDIGDWVLRKLSQNLRAKNIGTGEYYHQGVKEFLSHYELQDLEEELLKWRSDRKSNIPCWVLQNRLAEKLGNKEAVVYIPVRGGRIYFATHKVATGAVSIVFDQKQVWVCNADHVAAANIALTVKGIGEQSSDEENPDGGRIKLQLTS

SEQ ID NO: 44 - protein, 1054 aa, Artificial Sequence
  Synthetic sequence
MSSAIKSYKSVLRPNERKNQLLKSTIQCLEDGSAFFFKMLQGLFGGITPEIVRFSTEQEKQQQDIALWCAVNWFRPVSQDSLTHTIASDNLVEKFEEYYGGTASDAIKQYFSASIGESYYWNDCRQQYYDLCRELGVEVSDLTHDLEILCREKCLAVATESNQNNSIISVLFGTGEKEDRSVKLRITKKILEAISNLKEIPKNVAPIQEIILNVAKATKETFRQVYAGNLGAPSTLEKFIAKDGQKEFDLKKLQTDLKKVIRGKSKERDWCCQEELRSYVEQNTIQYDLWAWGEMFNKAHTALKIKSTRNYNFAKQRLEQFKEIQSLNNLLVVKKLNDFFDSEFFSGEETYTICVHHLGGKDLSKLYKAWEDDPADPENAIVVLCDDLKNNFKKEPIRNILRYIFTIRQECSAQDILAAAKYNQQLDRYKSQKANPSVLGNQGFTWTNAVILPEKAQRNDRPNSLDLRIWLYLKLRHPDGRWKKHHIPFYDTRFFQEIYAAGNSPVDTCQFRTPRFGYHLPKLTDQTAIRVNKKHVKAAKTEARIRLAIQQGTLPVSNLKITEISATINSKGQVRIPVKFRVGRQKGTLQIGDRFCGYDQNQTASHAYSLWEVVKEGQYHKELGCFVRFISSGDIVSITENRGNQFDQLSYEGLAYPQYADWRKKASKFVSLWQITKKNKKKEIVTVEAKEKFDAICKYQPRLYKFNKEYAYLLRDIVRGKSLVELQQIRQEIFRFIEQDCGVTRLGSLSLSTLETVKAVKGIIYSYFSTALNASKNNPISDEQRKEFDPELFALLEKLELIRTRKKKQKVERIANSLIQTCLENNIKFIRGEGDRSTTNNATKKKANSRSMDWLARGVFNKIRQLAPMHNITLFGCGRLYTSHQDPLVHRNPDKAMKCRWAAIPVKDIGRWVLRKLSQNLRAKNIGTGEYYHQGVKEFLSHYELQDLEEELLKWRSDRKSNIPCWVLQNRLAEKLGNKEAVVYIPVRGGRIYFATHKVATGAVSIVFDQKQVWVCNADHVAAANIALTVKGIGEQSSDEENPDGGRIKLQLTS

SEQ ID NO: 45 - protein, 1054 aa, Artificial Sequence
  Synthetic sequence
MSSAIKSYKSVLRPNERKNQLLKSTIQCLEDGSAFFFKMLQGLFGGITPEIVRFSTEQEKQQQDIALWCAVNWFRPVSQDSLTHTIASDNLVEKFEEYYGGTASDAIKQYFSASIGESYYWNDCRQQYYDLCRELGVEVSDLTHDLEILCREKCLAVATESNQNNSIISVLFGTGEKEDRSVKLRITKKILEAISNLKEIPKNVAPIQEIILNVAKATKETFRQVYAGNLGAPSTLEKFIAKDGQKEFDLKKLQTDLKKVIRGKSKERDWCCQEELRSYVEQNTIQYDLWAWGEMFNKAHTALKIKSTRNYNFAKQRLEQFKEIQSLNNLLVVKKLNDFFDSEFFSGEETYTICVHHLGGKDLSKLYKAWEDDPADPENAIVVLCDDLKNNFKKEPIRNILRYIFTIRQECSAQDILAAAKYNQQLDRYKSQKANPSVLGNQGFTWTNAVILPEKAQRNDRPNSLDLRIWLYLKLRHPDGRWKKHHIPFYDTRFFQEIYAAGNSPVDTCQFRTPRFGYHLPKLTDQTAIRVNKKHVKAAKTEARIRLAIQQGTLPVSNLKITEISATINSKGQVRIPVKFDVGRQKGTLQIGDRFCGYDQNQTASHAYSLWEVVKEGQYHKELGCFVRFISSGDIVSITENRGNQFDQLSYEGLAYPQYADWRKKASKFVSLWQITKKNKKKEIVTVEAKEKFDAICKYQPRLYKFNKEYAYLLRDIVRGKSLVELQQIRQEIFRFIEQDCGVTRLGSLSLSTLETVKAVKGIIYSYFSTALNASKNNPISDEQRKEFDPELFALLEKLELIRTRKKKQKVERIANSLIQTCLENNIKFIRGEGDRSTTNNATKKKANSRSMDWLARGVFNKIRQLAPMHNITLFGCGSLYTSHQDPLVHRNPDKAMKCRWAAIPVKDIGRWVLRKLSQNLRAKNRGTGEYYHQGVKEFLSHYELQDLEEELLKWRSDRKSNIPCWVLQNRLAEKLGNKEAVVYIPVRGGRIYFATHKVATGAVSIVFDQKQVWVCNADHVAAANIALTVKGIGEQSSDEENPDGGRIKLQLTS

SEQ ID NO: 46 - protein, 1054 aa, Artificial Sequence
  Synthetic sequence
MSSAIKSYKSVLRPNERKNQLLKSTIQCLEDGSAFFFKMLQGLFGGITPEIVRFSTEQEKQQQDIALWCAVNWFRPVSQDSLTHTIASDNLVEKFEEYYGGTASDAIKQYFSASIGESYYWNDCRQQYYDLCRELGVEVSDLTHDLEILCREKCLAVATESNQNNSIISVLFGTGEKEDRSVKLRITKKILEAISNLKEIPKNVAPIQEIILNVAKATKETFRQVYAGNLGAPSTLEKFIAKDGQKEFDLKKLQTDLKKVIRGKSKERDWCCQEELRSYVEQNTIQYDLWAWGEMFNKAHTALKIKSTRNYNFAKQRLEQFKEIQSLNNLLVVKKLNDFFDSEFFSGEETYTICVHHLGGKDLSKLYKAWEDDPADPENAIVVLCDDLKNNFKKEPIRNILRYIFTIRQECSAQDILAAAKYNQQLDRYKSQKANPSVLGNQGFTWTNAVILPEKAQRNDRPNSLDLRIWLYLKLRHPDGRWKKHHIPFYDTRFFQEIYAAGNSPVDTCQFRTPRFGYHLPKLTDQTAIRVNKKHVKAAKTEARIRLAIQQGTLPVSNLKITEISATINSKGQVRIPVKFRVGRQKGTLQIGDRFCGYDQNQTASHAYSLWEVVKEGQYHKELGCFVRFISSGDIVSITENRGNQFDQLSYEGLAYPQYADWRKKASKFVSLWQITKKNKKKEIVTVEAKEKFDAICKYQPRLYKFNKEYAYLLRDIVRGKSLVELQQIRQEIFRFIEQDCGVTRLGSLSLSTLETVKAVKGIIYSYFSTALNASKNNPISDEQRKEFDPELFALLEKLELIRTRKKKQKVERIANSLIQTCLENNIKFIRGEGDLSTTNNATKKKANSRSMDWLARGVFNKIRQLARMHNITLFGCGSLYTSHQDPLVHRNPDKAMKCRWAAIPVKDIGDWVLRKLSQNLRAKNRGTGEYYHQGVKEFLSHYELQDLEEELLKWRSDRKSNIPCWVLQNRLAEKLGNKEAVVYIPVRGGRIYFATHKVATGAVSIVFDQKQVWVCNADHVAAANIALTGKGIGEQSSDEENPDGSRIKLQLTS

SEQ ID NO: 47 - protein, 1054 aa, Artificial Sequence
  Synthetic sequence
MSSAIKSYKSVLRPNERKNQLLKSTIQCLEDGSAFFFKMLQGLFGGITPEIVRFSTEQEKQQQDIALWCAVNWFRPVSQDSLTHTIASDNLVEKFEEYYGGTASDAIKQYFSASIGESYYWNDCRQQYYDLCRELGVEVSDLTHDLEILCREKCLAVATESNQNNSIISVLFGTGEKEDRSVKLRITKKILEAISNLKEIPKNVAPIQEIILNVAKATKETFRQVYAGNLGAPSTLEKFIAKDGQKEFDLKKLQTDLKKVIRGKSKERDWCCQEELRSYVEQNTIQYDLWAWGEMFNKAHTALKIKSTRNYNFAKQRLEQFKEIQSLNNLLVVKKLNDFFDSEFFSGEETYTICVHHLGGKDLSKLYKAWEDDPADPENAIVVLCDDLKNNFKKEPIRNILRYIFTIRQECSAQDILAAAKYNQQLDRYKSQKANPSVLGNQGFTWTNAVILPEKAQRNDRPNSLDLRIWLYLKLRHPDGRWKKHHIPFYDTRFFQEIYAAGNSPVDTCQFRTPRFGYHLPKLTDQTAIRVNKKHVKAAKTEARIRLAIQQGTLPVSNLKITEISATINSKGQVRIPVKFRVGRQKGTLQIGDRFCGYDQNQTASHAYSLWEVVKEGQYHKELGCFVRFISSGDIVSITENRGNQFDQLSYEGLAYPQYADWRKKASKFVSLWQITKKNKKKEIVTVEAKEKFDAICKYQPRLYKFNKEYAYLLRDIVRGKSLVELQQIRQEIFRFIEQDCGVTRLGSLSLSTLETVKAVKGIIYSYFSTALNASKNNPISDEQRKEFDPELFALLEKLELIRTRKKKQKVERIANSLIQTCLENNIKFIRGEGDLSTTNNATKKKANSRSMDWLARGVFNKIRQLARMHNITLFGCGSLYTSHQDPLVHRNPDKAMKCRWAAIPVKDIGDWVLRKLSQNLRAKNRGTGEYYHQGVKEFLSHYELQDLEEELLKWRSDRKSNIPCWVLQNRLAEKLGNKEAVVYIPVRGGRIYFATHKVATGAVSIVFDQKQVWVCNADHVAAANIALTGKGIGEQSSDEENPDGGRIKLQLTS

SEQ ID NO: 48 - protein, 1054 aa, Artificial Sequence
  Synthetic sequence
MSSAIKSYKSVLRPNERKNQLLKSTIQCLEDGSAFFFKMLQGLFGGITPEIVRFSTEQEKQQQDIALWCAVNWFRPVSQDSLTHTIASDNLVEKFEEYYGGTASDAIKQYFSASIGESYYWNDCRQQYYDLCRELGVEVSDLTHDLEILCREKCLAVATESNQNNSIISVLFGTGEKEDRSVKLRITKKILEAISNLKEIPKNVAPIQEIILNVAKATKETFRQVYAGNLGAPSTLEKFIAKDGQKEFDLKKLQTDLKKVIRGKSKERDWCCQEELRSYVEQNTIQYDLWAWGEMFNKAHTALKIKSTRNYNFAKQRLEQFKEIQSLNNLLVVKKLNDFFDSEFFSGEETYTICVHHLGGKDLSKLYKAWEDDPADPENAIVVLCDDLKNNFKKEPIRNILRYIFTIRQECSAQDILAAAKYNQQLDRYKSQKANPSVLGNQGFTWTNAVILPEKAQRNDRPNSLDLRIWLYLKLRHPDGRWKKHHIPFYDTRFFQEIYAAGNSPVDTCQFRTPRFGYHLPKLTDQTAIRVNKKHVKAAKTEARIRLAIQQGTLPVSNLKITEISATINSKGQVRIPVKFRVGRQKGTLQIGDRFCGYDQNQTASHAYSLWEVVKEGQYHKELGCFVRFISSGDIVSITENRGNQFDQLSYEGLAYPQYADWRKKASKFVSLWQITKKNKKKEIVTVEAKEKFDAICKYQPRLYKFNKEYAYLLRDIVRGKSLVELQQIRQEIFRFIEQDCGVTRLGSLSLSTLETVKAVKGIIYSYFSTALNASKNNPISDEQRKEFDPELFALLEKLELIRTRKKKQKVERIANSLIQTCLENNIKFIRGEGDLSTTNNATKKKANSRSMDWLARGVFNKIRQLARMHNITLFGCGSLYTSHQDPLVHRNPDKAMKCRWAAIPVKDIGRWVLRKLSQNLRAKNRGTGEYYHQGVKEFLSHYELQDLEEELLKWRSDRKSNIPCWVLQNRLAEKLGNKEAVVYIPVRGGRIYFATHKVATGAVSIVFDQKQVWVCNADHVAAANIALTGKGIGEQSSDEENPDGSRIKLQLTS

SEQ ID NO: 49 - protein, 1054 aa, Artificial Sequence
  Synthetic sequence
MSSAIKSYKSVLRPNERKNQLLKSTIQCLEDGSAFFFKMLQGLFGGITPEIVRFSTEQEKQQQDIALWCAVNWFRPVSQDSLTHTIASDNLVEKFEEYYGGTASDAIKQYFSASIGESYYWNDCRQQYYDLCRELGVEVSDLTHDLEILCREKCLAVATESNQNNSIISVLFGTGEKEDRSVKLRITKKILEAISNLKEIPKNVAPIQEIILNVAKATKETFRQVYAGNLGAPSTLEKFIAKDGQKEFDLKKLQTDLKKVIRGKSKERDWCCQEELRSYVEQNTIQYDLWAWGEMFNKAHTALKIKSTRNYNFAKQRLEQFKEIQSLNNLLVVKKLNDFFDSEFFSGEETYTICVHHLGGKDLSKLYKAWEDDPADPENAIVVLCDDLKNNFKKEPIRNILRYIFTIRQECSAQDILAAAKYNQQLDRYKSQKANPSVLGNQGFTWTNAVILPEKAQRNDRPNSLDLRIWLYLKLRHPDGRWKKHHIPFYDTRFFQEIYAAGNSPVDTCQFRTPRFGYHLPKLTDQTAIRVNKKHVKAAKTEARIRLAIQQGTLPVSNLKITEISATINSKGQVRIPVKFRVGRQKGTLQIGDRFCGYDQNQTASHAYSLWEVVKEGQYHKELGCFVRFISSGDIVSITENRGNQFDQLSYEGLAYPQYADWRKKASKFVSLWQITKKNKKKEIVTVEAKEKFDAICKYQPRLYKFNKEYAYLLRDIVRGKSLVELQQIRQEIFRFIEQDCGVTRLGSLSLSTLETVKAVKGIIYSYFSTALNASKNNPISDEQRKEFDPELFALLEKLELIRTRKKKQKVERIANSLIQTCLENNIKFIRGEGDLSTTNNATKKKANSRSMDWLARGVFNKIRQLAPMHNITLFGCGSLYTSHQDPLVHRNPDKAMKCRWAAIPVKDIGRWVLRKLSQNLRAKNRGTGEYYHQGVKEFLSHYELQDLEEELLKWRSDRKSNIPCWVLQNRLAEKLGNKEAVVYIPVRGGRIYFATHKVATGAVSIVFDQKQVWVCNADHVAAANIALTGKGIGEQSSDEENPDGGRIKLQLTS

SEQ ID NO: 50 - protein, 1054 aa, Artificial Sequence
  Synthetic sequence
MSSAIKSYKSVLRPNERKNQLLKSTIQCLEDGSAFFFKMLQGLFGGITPEIVRFSTEQEKQQQDIALWCAVNWFRPVSQDSLTHTIASDNLVEKFEEYYGGTASDAIKQYFSASIGESYYWNDCRQQYYDLCRELGVEVSDLTHDLEILCREKCLAVATESNQNNSIISVLFGTGEKEDRSVKLRITKKILEAISNLKEIPKNVAPIQEIILNVAKATKETFRQVYAGNLGAPSTLEKFIAKDGQKEFDLKKLQTDLKKVIRGKSKERDWCCQEELRSYVEQNTIQYDLWAWGEMFNKAHTALKIKSTRNYNFAKQRLEQFKEIQSLNNLLVVKKLNDFFDSEFFSGEETYTICVHHLGGKDLSKLYKAWEDDPADPENAIVVLCDDLKNNFKKEPIRNILRYIFTIRQECSAQDILAAAKYNQQLDRYKSQKANPSVLGNQGFTWTNAVILPEKAQRNDRPNSLDLRIWLYLKLRHPDGRWKKHHIPFYDTRFFQEIYAAGNSPVDTCQFRTPRFGYHLPKLTDQTAIRVNKKHVKAAKTEARIRLAIQQGTLPVSNLKITEISATINSKGQVRIPVKFRVGRQKGTLQIGDRFCGYDQNQTASHAYSLWEVVKEGQYHKELGCFVRFISSGDIVSITENRGNQFDQLSYEGLAYPQYADWRKKASKFVSLWQITKKNKKKEIVTVEAKEKFDAICKYQPRLYKFNKEYAYLLRDIVRGKSLVELQQIRQEIFRFIEQDCGVTRLGSLSLSTLETVKAVKGIIYSYFSTALNASKNNPISDEQRKEFDPELFALLEKLELIRTRKKKQKVERIANSLIQTCLENNIKFIRGEGDLSTTNNATKKKANSRSMDWLARGVFNKIRQLARMHNITLFGCGSLYTSHQDPLVHRNPDKAMKCRWAAIPVKDIGRWVLRKLSQNLRAKNRGTGEYYHQGVKEFLSHYELQDLEEELLKWRSDRKSNIPCWVLQNRLAEKLGNKEAVVYIPVRGGRIYFATHKVATGAVSIVFDQKQVWVCNADHVAAANIALTGKGIGEQSSDEENPDGGRIKLQLTS

SEQ ID NO: 51 - protein, 1054 aa, Artificial Sequence
  Synthetic sequence
MSSAIKSYKSVLRPNERKNQLLKSTIQCLEDGSAFFFKMLQGLFGGITPEIVRFSTEQEKQQQDIALWCAVNWFRPVSQDSLTHTIASDNLVEKFEEYYGGTASDAIKQYFSASIGESYYWNDCRQQYYDLCRELGVEVSDLTHDLEILCREKCLAVATESNQNNSIISVLFGTGEKEDRSVKLRITKKILEAISNLKEIPKNVAPIQEIILNVAKATKETFRQVYAGNLGAPSTLEKFIAKDGQKEFDLKKLQTDLKKVIRGKSKERDWCCQEELRSYVEQNTIQYDLWAWGEMFNKAHTALKIKSTRNYNFAKQRLEQFKEIQSLNNLLVVKKLNDFFDSEFFSGEETYTICVHHLGGKDLSKLYKAWEDDPADPENAIVVLCDDLKNNFKKEPIRNILRYIFTIRQECSAQDILAAAKYNQQLDRYKSQKANPSVLGNQGFTWTNAVILPEKAQRNDRPNSLDLRIWLYLKLRHPDGRWKKHHIPFYDTRFFQEIYAAGNSPVDTCQFRTPRFGYHLPKLTDQTAIRVNKKHVKAAKTEARIRLAIQQGTLPVSNLKITEISATINSKGQVRIPVKFKVGRQKGTLQIGDRFCGYDQNQTASHAYSLWEVVKEGQYHKELGCFVRFISSGDIVSITENRGNQFDQLSYEGLAYPQYADWRKKASKFVSLWQITKKNKKKEIVTVEAKEKFDAICKYQPRLYKFNKEYAYLLRDIVRGKSLVELQQIRQEIFRFIEQDCGVTRLGSLSLSTLETVKAVKGIIYSYFSTALNASKNNPISDEQRKEFDPELFALLEKLELIRTRKKKQKVERIANSLIQTCLENNIKFIRGEGDLSTTNNATKKKANSRSMDWLARGVFNKIRQLAPMHNITLFGCGSLYTSHQDPLVHRNPDKAMKCRWAAIPVKDIGRWVLRKLSQNLRAKNRGTGEYYHQGVKEFLSHYELQDLEEELLKWRSDRKSNIPCWVLQNRLAEKLGNKEAVVYIPVRGGRIYFATHKVATGAVSIVFDQKQVWVCNADHVAAANIALTGKGIGEQSSDEENPDGSRIKLQLTS

SEQ ID NO: 52 - protein, 1054 aa, Artificial Sequence
  Synthetic sequence
MSSAIKSYKSVLRPNERKNQLLKSTIQCLEDGSAFFFKMLQGLFGGITPEIVRFSTEQEKQQQDIALWCAVNWFRPVSQDSLTHTIASDNLVEKFEEYYGGTASDAIKQYFSASIGESYYWNDCRQQYYDLCRELGVEVSDLTHDLEILCREKCLAVATESNQNNSIISVLFGTGEKEDRSVKLRITKKILEAISNLKEIPKNVAPIQEIILNVAKATKETFRQVYAGNLGAPSTLEKFIAKDGQKEFDLKKLQTDLKKVIRGKSKERDWCCQEELRSYVEQNTIQYDLWAWGEMFNKAHTALKIKSTRNYNFAKQRLEQFKEIQSLNNLLVVKKLNDFFDSEFFSGEETYTICVHHLGGKDLSKLYKAWEDDPADPENAIVVLCDDLKNNFKKEPIRNILRYIFTIRQECSAQDILAAAKYNQQLDRYKSQKANPSVLGNQGFTWTNAVILPEKAQRNDRPNSLDLRIWLYLKLRHPDGRWKKHHIPFYDTRFFQEIYAAGNSPVDTCQFRTPRFGYHLPKLTDQTAIRVNKKHVKAAKTEARIRLAIQQGTLPVSNLKITEISATINSKGQVRIPVKFNVGRQKGTLQIGDRFCGYDQNQTASHAYSLWEVVKEGQYHKELGCFVRFISSGDIVSITENRGNQFDQLSYEGLAYPQYADWRKKASKFVSLWQITKKNKKKEIVTVEAKEKFDAICKYQPRLYKFNKEYAYLLRDIVRGKSLVELQQIRQEIFRFIEQDCGVTRLGSLSLSTLETVKAVKGIIYSYFSTALNASKNNPISDEQRKEFDPELFALLEKLELIRTRKKKQKVERIANSLIQTCLENNIKFIRGEGDLSTTNNATKKKANSRSMDWLARGVFNKIRQLAPMHNITLFGCGSLYTSHQDPLVHRNPDKAMKCRWAAIPVKDIGRWVLRKLSQNLRAKNRGTGEYYHQGVKEFLSHYELQDLEEELLKWRSDRKSNIPCWVLQNRLAEKLGNKEAVVYIPVRGGRIYFATHKVATGAVSIVFDQKQVWVCNADHVAAANIALTGKGIGEQSSDEENPDGSRIKLQLTS

SEQ ID NO: 53 - protein, 1054 aa, Artificial Sequence
  Synthetic sequence
MSSAIKSYKSVLRPNERKNQLLKSTIQCLEDGSAFFFKMLQGLFGGITPEIVRFSTEQEKQQQDIALWCAVNWFRPVSQDSLTHTIASDNLVEKFEEYYGGTASDAIKQYFSASIGESYYWNDCRQQYYDLCRELGVEVSDLTHDLEILCREKCLAVATESNQNNSIISVLFGTGEKEDRSVKLRITKKILEAISNLKEIPKNVAPIQEIILNVAKATKETFRQVYAGNLGAPSTLEKFIAKDGQKEFDLKKLQTDLKKVIRGKSKERDWCCQEELRSYVEQNTIQYDLWAWGEMFNKAHTALKIKSTRNYNFAKQRLEQFKEIQSLNNLLVVKKLNDFFDSEFFSGEETYTICVHHLGGKDLSKLYKAWEDDPADPENAIVVLCDDLKNNFKKEPIRNILRYIFTIRQECSAQDILAAAKYNQQLDRYKSQKANPSVLGNQGFTWTNAVILPEKAQRNDRPNSLDLRIWLYLKLRHPDGRWKKHHIPFYDTRFFQEIYAAGNSPVDTCQFRTPRFGYHLPKLTDQTAIRVNKKHVKAAKTEARIRLAIQQGTLPVSNLKITEISATINSKGQVRIPVKFHVGRQKGTLQIGDRFCGYDQNQTASHAYSLWEVVKEGQYHKELGCFVRFISSGDIVSITENRGNQFDQLSYEGLAYPQYADWRKKASKFVSLWQITKKNKKKEIVTVEAKEKFDAICKYQPRLYKFNKEYAYLLRDIVRGKSLVELQQIRQEIFRFIEQDCGVTRLGSLSLSTLETVKAVKGIIYSYFSTALNASKNNPISDEQRKEFDPELFALLEKLELIRTRKKKQKVERIANSLIQTCLENNIKFIRGEGDLSTTNNATKKKANSRSMDWLARGVFNKIRQLAPMHNITLFGCGSLYTSHQDPLVHRNPDKAMKCRWAAIPVKDIGRWVLRKLSQNLRAKNRGTGEYYHQGVKEFLSHYELQDLEEELLKWRSDRKSNIPCWVLQNRLAEKLGNKEAVVYIPVRGGRIYFATHKVATGAVSIVFDQKQVWVCNADHVAAANIALTGKGIGEQSSDEENPDGSRIKLQLTS

SEQ ID NO: 54 - protein, 1054 aa, Artificial Sequence
  Synthetic sequence
MSSAIKSYKSVLRPNERKNQLLKSTIQCLEDGSAFFFKMLQGLFGGITPEIVRFSTEQEKQQQDIALWCAVNWFRPVSQDSLTHTIASDNLVEKFEEYYGGTASDAIKQYFSASIGESYYWNDCRQQYYDLCRELGVEVSDLTHDLEILCREKCLAVATESNQNNSIISVLFGTGEKEDRSVKLRITKKILEAISNLKEIPKNVAPIQEIILNVAKATKETFRQVYAGNLGAPSTLEKFIAKDGQKEFDLKKLQTDLKKVIRGKSKERDWCCQEELRSYVEQNTIQYDLWAWGEMFNKAHTALKIKSTRNYNFAKQRLEQFKEIQSLNNLLVVKKLNDFFDSEFFSGEETYTICVHHLGGKDLSKLYKAWEDDPADPENAIVVLCDDLKNNFKKEPIRNILRYIFTIRQECSAQDILAAAKYNQQLDRYKSQKANPSVLGNQGFTWTNAVILPEKAQRNDRPNSLDLRIWLYLKLRHPDGRWKKHHIPFYDTRFFQEIYAAGNSPVDTCQFRTPRFGYHLPKLTDQTAIRVNKKHVKAAKTEARIRLAIQQGTLPVSNLKITEISATINSKGQVRIPVKFRVGRQKGTLQIGDRFCGYDQNQTASHAYSLWEVVKEGQYHKELGCFVRFISSGDIVSITENRGNQFDQLSYEGLAYPQYADWRKKASKFVSLWQITKKNKKKEIVTVEAKEKFDAICKYQPRLYKFNKEYAYLLRDIVRGKSLVELQQIRQEIFRFIEQDCGVTRLGSLSLSTLETVKAVKGIIYSYFSTALNASKNNPISDEQRKEFDPELFALLEKLELIRTRKKKQKVERIANSLIQTCLENNIKFIRGEGDLSTTNNATKKKANSRSMDWLARGVFNKIRQLAPMHNITLFGCGSLYTSHQDPLVHRNPDKAMKCRWAAIPVKDIGRWVLRKLSQNLRAKNKGTGEYYHQGVKEFLSHYELQDLEEELLKWRSDRKSNIPCWVLQNRLAEKLGNKEAVVYIPVRGGRIYFATHKVATGAVSIVFDQKQVWVCNADHVAAANIALTGKGIGEQSSDEENPDGSRIKLQLTS

SEQ ID NO: 55 - protein, 1054 aa, Artificial Sequence
  Synthetic sequence
MSSAIKSYKSVLRPNERKNQLLKSTIQCLEDGSAFFFKMLQGLFGGITPEIVRFSTEQEKQQQDIALWCAVNWFRPVSQDSLTHTIASDNLVEKFEEYYGGTASDAIKQYFSASIGESYYWNDCRQQYYDLCRELGVEVSDLTHDLEILCREKCLAVATESNQNNSIISVLFGTGEKEDRSVKLRITKKILEAISNLKEIPKNVAPIQEIILNVAKATKETFRQVYAGNLGAPSTLEKFIAKDGQKEFDLKKLQTDLKKVIRGKSKERDWCCQEELRSYVEQNTIQYDLWAWGEMFNKAHTALKIKSTRNYNFAKQRLEQFKEIQSLNNLLVVKKLNDFFDSEFFSGEETYTICVHHLGGKDLSKLYKAWEDDPADPENAIVVLCDDLKNNFKKEPIRNILRYIFTIRQECSAQDILAAAKYNQQLDRYKSQKANPSVLGNQGFTWTNAVILPEKAQRNDRPNSLDLRIWLYLKLRHPDGRWKKHHIPFYDTRFFQEIYAAGNSPVDTCQFRTPRFGYHLPKLTDQTAIRVNKKHVKAAKTEARIRLAIQQGTLPVSNLKITEISATINSKGQVRIPVKFRVGRQKGTLQIGDRFCGYDQNQTASHAYSLWEVVKEGQYHKELGCFVRFISSGDIVSITENRGNQFDQLSYEGLAYPQYADWRKKASKFVSLWQITKKNKKKEIVTVEAKEKFDAICKYQPRLYKFNKEYAYLLRDIVRGKSLVELQQIRQEIFRFIEQDCGVTRLGSLSLSTLETVKAVKGIIYSYFSTALNASKNNPISDEQRKEFDPELFALLEKLELIRTRKKKQKVERIANSLIQTCLENNIKFIRGEGDLSTTNNATKKKANSRSMDWLARGVFNKIRQLAPMHNITLFGCGSLYTSHQDPLVHRNPDKAMKCRWAAIPVKDIGRWVLRKLSQNLRAKNNGTGEYYHQGVKEFLSHYELQDLEEELLKWRSDRKSNIPCWVLQNRLAEKLGNKEAVVYIPVRGGRIYFATHKVATGAVSIVFDQKQVWVCNADHVAAANIALTGKGIGEQSSDEENPDGSRIKLQLTS

SEQ ID NO: 56 - protein, 1054 aa, Artificial Sequence
  Synthetic sequence
MSSAIKSYKSVLRPNERKNQLLKSTIQCLEDGSAFFFKMLQGLFGGITPEIVRFSTEQEKQQQDIALWCAVNWFRPVSQDSLTHTIASDNLVEKFEEYYGGTASDAIKQYFSASIGESYYWNDCRQQYYDLCRELGVEVSDLTHDLEILCREKCLAVATESNQNNSIISVLFGTGEKEDRSVKLRITKKILEAISNLKEIPKNVAPIQEIILNVAKATKETFRQVYAGNLGAPSTLEKFIAKDGQKEFDLKKLQTDLKKVIRGKSKERDWCCQEELRSYVEQNTIQYDLWAWGEMFNKAHTALKIKSTRNYNFAKQRLEQFKEIQSLNNLLVVKKLNDFFDSEFFSGEETYTICVHHLGGKDLSKLYKAWEDDPADPENAIVVLCDDLKNNFKKEPIRNILRYIFTIRQECSAQDILAAAKYNQQLDRYKSQKANPSVLGNQGFTWTNAVILPEKAQRNDRPNSLDLRIWLYLKLRHPDGRWKKHHIPFYDTRFFQEIYAAGNSPVDTCQFRTPRFGYHLPKLTDQTAIRVNKKHVKAAKTEARIRLAIQQGTLPVSNLKITEISATINSKGQVRIPVKFRVGRQKGTLQIGDRFCGYDQNQTASHAYSLWEVVKEGQYHKELGCFVRFISSGDIVSITENRGNQFDQLSYEGLAYPQYADWRKKASKFVSLWQITKKNKKKEIVTVEAKEKFDAICKYQPRLYKFNKEYAYLLRDIVRGKSLVELQQIRQEIFRFIEQDCGVTRLGSLSLSTLETVKAVKGIIYSYFSTALNASKNNPISDEQRKEFDPELFALLEKLELIRTRKKKQKVERIANSLIQTCLENNIKFIRGEGDLSTTNNATKKKANSRSMDWLARGVFNKIRQLAPMHNITLFGCGSLYTSHQDPLVHRNPDKAMKCRWAAIPVKDIGRWVLRKLSQNLRAKNHGTGEYYHQGVKEFLSHYELQDLEEELLKWRSDRKSNIPCWVLQNRLAEKLGNKEAVVYIPVRGGRIYFATHKVATGAVSIVFDQKQVWVCNADHVAAANIALTGKGIGEQSSDEENPDGSRIKLQLTS

SEQ ID NO: 57 - protein, 1054 aa, Artificial Sequence
  Synthetic sequence
MSSAIKSYKSVLRPNERKNQLLKSTIQCLEDGSAFFFKMLQGLFGGITPEIVRFSTEQEKQQQDIALWCAVNWFRPVSQDSLTHTIASDNLVEKFEEYYGGTASDAIKQYFSASIGESYYWNDCRQQYYDLCRELGVEVSDLTHDLEILCREKCLAVATESNQNNSIISVLFGTGEKEDRSVKLRITKKILEAISNLKEIPKNVAPIQEIILNVAKATKETFRQVYAGNLGAPSTLEKFIAKDGQKEFDLKKLQTDLKKVIRGKSKERDWCCQEELRSYVEQNTIQYDLWAWGEMFNKAHTALKIKSTRNYNFAKQRLEQFKEIQSLNNLLVVKKLNDFFDSEFFSGEETYTICVHHLGGKDLSKLYKAWEDDPADPENAIVVLCDDLKNNFKKEPIRNILRYIFTIRQECSAQDILAAAKYNQQLDRYKSQKANPSVLGNQGFTWTNAVILPEKAQRNDRPNSLDLRIWLYLKLRHPDGRWKKHHIPFYDTRFFQEIYAAGNSPVDTCQFRTPRFGYHLPKLTDQTAIRVNKKHVKAAKTEARIRLAIQQGTLPVSNLKITEISATINSKGQVRIPVKFRVGRQKGTLQIGDRFCGYDQNQTASHAYSLWEVVKEGQYHKELGCFVRFISSGDIVSITENRGNQFDQLSYEGLAYPQYADWRKKASKFVSLWQITKKNKKKEIVTVEAKEKFDAICKYQPRLYKFNKEYAYLLRDIVRGKSLVELQQIRQEIFRFIEQDCGVTRLGSLSLSTLETVKAVKGIIYSYFSTALNASKNNPISDEQRKEFDPELFALLEKLELIRTRKKKQKVERIANSLIQTCLENNIKFIRGEGDLSTTNNATKKKANSRSMDWLARGVFNKIRQLAPMHNITLFGCGSLYTSHQDPLVHRNPDKAMKCRWAAIPVKDIGRWVLRKLSQNLRAKNRGTGEYYHQGVKEFLSHYELQDLEEELLKWRSDRKSNIPCWVLQNRLAEKLGNKEAVVYIPVRGGRIYFATHKVATGAVSIVFDQKQVWVCNADHVAAANIALTKKGIGEQSSDEENPDGSRIKLQLTS

SEQ ID NO: 58 - protein, 1054 aa, Artificial Sequence
  Synthetic sequence
MSSAIKSYKSVLRPNERKNQLLKSTIQCLEDGSAFFFKMLQGLFGGITPEIVRFSTEQEKQQQDIALWCAVNWFRPVSQDSLTHTIASDNLVEKFEEYYGGTASDAIKQYFSASIGESYYWNDCRQQYYDLCRELGVEVSDLTHDLEILCREKCLAVATESNQNNSIISVLFGTGEKEDRSVKLRITKKILEAISNLKEIPKNVAPIQEIILNVAKATKETFRQVYAGNLGAPSTLEKFIAKDGQKEFDLKKLQTDLKKVIRGKSKERDWCCQEELRSYVEQNTIQYDLWAWGEMFNKAHTALKIKSTRNYNFAKQRLEQFKEIQSLNNLLVVKKLNDFFDSEFFSGEETYTICVHHLGGKDLSKLYKAWEDDPADPENAIVVLCDDLKNNFKKEPIRNILRYIFTIRQECSAQDILAAAKYNQQLDRYKSQKANPSVLGNQGFTWTNAVILPEKAQRNDRPNSLDLRIWLYLKLRHPDGRWKKHHIPFYDTRFFQEIYAAGNSPVDTCQFRTPRFGYHLPKLTDQTAIRVNKKHVKAAKTEARIRLAIQQGTLPVSNLKITEISATINSKGQVRIPVKFRVGRQKGTLQIGDRFCGYDQNQTASHAYSLWEVVKEGQYHKELGCFVRFISSGDIVSITENRGNQFDQLSYEGLAYPQYADWRKKASKFVSLWQITKKNKKKEIVTVEAKEKFDAICKYQPRLYKFNKEYAYLLRDIVRGKSLVELQQIRQEIFRFIEQDCGVTRLGSLSLSTLETVKAVKGIIYSYFSTALNASKNNPISDEQRKEFDPELFALLEKLELIRTRKKKQKVERIANSLIQTCLENNIKFIRGEGDLSTTNNATKKKANSRSMDWLARGVFNKIRQLAPMHNITLFGCGSLYTSHQDPLVHRNPDKAMKCRWAAIPVKDIGRWVLRKLSQNLRAKNRGTGEYYHQGVKEFLSHYELQDLEEELLKWRSDRKSNIPCWVLQNRLAEKLGNKEAVVYIPVRGGRIYFATHKVATGAVSIVFDQKQVWVCNADHVAAANIALTNKGIGEQSSDEENPDGSRIKLQLTS

SEQ ID NO: 59 - protein, 1054 aa, Artificial Sequence
  Synthetic sequence
MSSAIKSYKSVLRPNERKNQLLKSTIQCLEDGSAFFFKMLQGLFGGITPEIVRFSTEQEKQQQDIALWCAVNWFRPVSQDSLTHTIASDNLVEKFEEYYGGTASDAIKQYFSASIGESYYWNDCRQQYYDLCRELGVEVSDLTHDLEILCREKCLAVATESNQNNSIISVLFGTGEKEDRSVKLRITKKILEAISNLKEIPKNVAPIQEIILNVAKATKETFRQVYAGNLGAPSTLEKFIAKDGQKEFDLKKLQTDLKKVIRGKSKERDWCCQEELRSYVEQNTIQYDLWAWGEMFNKAHTALKIKSTRNYNFAKQRLEQFKEIQSLNNLLVVKKLNDFFDSEFFSGEETYTICVHHLGGKDLSKLYKAWEDDPADPENAIVVLCDDLKNNFKKEPIRNILRYIFTIRQECSAQDILAAAKYNQQLDRYKSQKANPSVLGNQGFTWTNAVILPEKAQRNDRPNSLDLRIWLYLKLRHPDGRWKKHHIPFYDTRFFQEIYAAGNSPVDTCQFRTPRFGYHLPKLTDQTAIRVNKKHVKAAKTEARIRLAIQQGTLPVSNLKITEISATINSKGQVRIPVKFRVGRQKGTLQIGDRFCGYDQNQTASHAYSLWEVVKEGQYHKELGCFVRFISSGDIVSITENRGNQFDQLSYEGLAYPQYADWRKKASKFVSLWQITKKNKKKEIVTVEAKEKFDAICKYQPRLYKFNKEYAYLLRDIVRGKSLVELQQIRQEIFRFIEQDCGVTRLGSLSLSTLETVKAVKGIIYSYFSTALNASKNNPISDEQRKEFDPELFALLEKLELIRTRKKKQKVERIANSLIQTCLENNIKFIRGEGDLSTTNNATKKKANSRSMDWLARGVFNKIRQLAPMHNITLFGCGSLYTSHQDPLVHRNPDKAMKCRWAAIPVKDIGRWVLRKLSQNLRAKNRGTGEYYHQGVKEFLSHYELQDLEEELLKWRSDRKSNIPCWVLQNRLAEKLGNKEAVVYIPVRGGRIYFATHKVATGAVSIVFDQKQVWVCNADHVAAANIALTHKGIGEQSSDEENPDGSRIKLQLTS

SEQ ID NO: 60 - protein, 1054 aa, Artificial Sequence
  Synthetic sequence
MSSAIKSYKSVLRPNERKNQLLKSTIQCLEDGSAFFFKMLQGLFGGITPEIVRFSTEQEKQQQDIALWCAVNWFRPVSQDSLTHTIASDNLVEKFEEYYGGTASDAIKQYFSASIGESYYWNDCRQQYYDLCRELGVEVSDLTHDLEILCREKCLAVATESNQNNSIISVLFGTGEKEDRSVKLRITKKILEAISNLKEIPKNVAPIQEIILNVAKATKETFRQVYAGNLGAPSTLEKFIAKDGQKEFDLKKLQTDLKKVIRGKSKERDWCCQEELRSYVEQNTIQYDLWAWGEMFNKAHTALKIKSTRNYNFAKQRLEQFKEIQSLNNLLVVKKLNDFFDSEFFSGEETYTICVHHLGGKDLSKLYKAWEDDPADPENAIVVLCDDLKNNFKKEPIRNILRYIFTIRQECSAQDILAAAKYNQQLDRYKSQKANPSVLGNQGFTWTNAVILPEKAQRNDRPNSLDLRIWLYLKLRHPDGRWKKHHIPFYDTRFFQEIYAAGNSPVDTCQFRTPRFGYHLPKLTDQTAIRVNKKHVKAAKTEARIRLAIQQGTLPVSNLKITEISATINSKGQVRIPVKFRVGRQKRTLQIGDRFCGYDQNQTASHAYSLWEVVKEGQYHKELGCFVRFISSGDIVSITENRGNQFDQLSYEGLAYPQYADWRKKASKFVSLWQITKKNKKKEIVTVEAKEKFDAICKYQPRLYKFNKEYAYLLRDIVRGKSLVELQQIRQEIFRFIEQDCGVTRLGSLSLSTLETVKAVKGIIYSYFSTALNASKNNPISDEQRKEFDPELFALLEKLELIRTRKKKQKVERIANSLIQTCLENNIKFIRGEGDLSTTNNATKKKANSRSMDWLARGVFNKIRQLAPMHNITLFGCGSLYTSHQDPLVHRNPDKAMKCRWAAIPVKDIGRWVLRKLSQNLRAKNRGTGEYYHQGVKEFLSHYELQDLEEELLKWRSDRKSNIPCWVLQNRLAEKLGNKEAVVYIPVRGGRIYFATHKVATGAVSIVFDQKQVWVCNADHVAAANIALTGKGIGEQSSDEENPDGSRIKLQLTS

SEQ ID NO: 61 - protein, 1054 aa, Artificial Sequence
  Synthetic sequence
MSSAIKSYKSVLRPNERKNQLLKSTIQCLEDGSAFFFKMLQGLFGGITPEIVRFSTEQEKQQQDIALWCAVNWFRPVSQDSLTHTIASDNLVEKFEEYYGGTASDAIKQYFSASIGESYYWNDCRQQYYDLCRELGVEVSDLTHDLEILCREKCLAVATESNQNNSIISVLFGTGEKEDRSVKLRITKKILEAISNLKEIPKNVAPIQEIILNVAKATKETFRQVYAGNLGAPSTLEKFIAKDGQKEFDLKKLQTDLKKVIRGKSKERDWCCQEELRSYVEQNTIQYDLWAWGEMFNKAHTALKIKSTRNYNFAKQRLEQFKEIQSLNNLLVVKKLNDFFDSEFFSGEETYTICVHHLGGKDLSKLYKAWEDDPADPENAIVVLCDDLKNNFKKEPIRNILRYIFTIRQECSAQDILAAAKYNQQLDRYKSQKANPSVLGNQGFTWTNAVILPEKAQRNDRPNSLDLRIWLYLKLRHPDGRWKKHHIPFYDTRFFQEIYAAGNSPVDTCQFRTPRFGYHLPKLTDQTAIRVNKKHVKAAKTEARIRLAIQQGTLPVSNLKITEISATINSKGQVRIPVKFRVGRQKGTLQIGDRFCGYDQNQTASHAYSLWEVVKEGQYHKERGCFVRFISSGDIVSITENRGNQFDQLSYEGLAYPQYADWRKKASKFVSLWQITKKNKKKEIVTVEAKEKFDAICKYQPRLYKFNKEYAYLLRDIVRGKSLVELQQIRQEIFRFIEQDCGVTRLGSLSLSTLETVKAVKGIIYSYFSTALNASKNNPISDEQRKEFDPELFALLEKLELIRTRKKKQKVERIANSLIQTCLENNIKFIRGEGDLSTTNNATKKKANSRSMDWLARGVFNKIRQLAPMHNITLFGCGSLYTSHQDPLVHRNPDKAMKCRWAAIPVKDIGRWVLRKLSQNLRAKNRGTGEYYHQGVKEFLSHYELQDLEEELLKWRSDRKSNIPCWVLQNRLAEKLGNKEAVVYIPVRGGRIYFATHKVATGAVSIVFDQKQVWVCNADHVAAANIALTGKGIGEQSSDEENPDGSRIKLQLTS

SEQ ID NO: 62 - protein, 1054 aa, Artificial Sequence
  Synthetic sequence
MSSAIKSYKSVLRPNERKNQLLKSTIQCLEDGSAFFFKMLQGLFGGITPEIVRFSTEQEKQQQDIALWCAVNWFRPVSQDSLTHTIASDNLVEKFEEYYGGTASDAIKQYFSASIGESYYWNDCRQQYYDLCRELGVEVSDLTHDLEILCREKCLAVATESNQNNSIISVLFGTGEKEDRSVKLRITKKILEAISNLKEIPKNVAPIQEIILNVAKATKETFRQVYAGNLGAPSTLEKFIAKDGQKEFDLKKLQTDLKKVIRGKSKERDWCCQEELRSYVEQNTIQYDLWAWGEMFNKAHTALKIKSTRNYNFAKQRLEQFKEIQSLNNLLVVKKLNDFFDSEFFSGEETYTICVHHLGGKDLSKLYKAWEDDPADPENAIVVLCDDLKNNFKKEPIRNILRYIFTIRQECSAQDILAAAKYNQQLDRYKSQKANPSVLGNQGFTWTNAVILPEKAQRNDRPNSLDLRIWLYLKLRHPDGRWKKHHIPFYDTRFFQEIYAAGNSPVDTCQFRTPRFGYHLPKLTDQTAIRVNKKHVKAAKTEARIRLAIQQGTLPVSNLKITEISATINSKGQVRIPVKFRVGRQKGTLQIGDRFCGYDQNQTASHAYSLWEVVKEGQYHKELRCFVRFISSGDIVSITENRGNQFDQLSYEGLAYPQYADWRKKASKFVSLWQITKKNKKKEIVTVEAKEKFDAICKYQPRLYKFNKEYAYLLRDIVRGKSLVELQQIRQEIFRFIEQDCGVTRLGSLSLSTLETVKAVKGIIYSYFSTALNASKNNPISDEQRKEFDPELFALLEKLELIRTRKKKQKVERIANSLIQTCLENNIKFIRGEGDLSTTNNATKKKANSRSMDWLARGVFNKIRQLAPMHNITLFGCGSLYTSHQDPLVHRNPDKAMKCRWAAIPVKDIGRWVLRKLSQNLRAKNRGTGEYYHQGVKEFLSHYELQDLEEELLKWRSDRKSNIPCWVLQNRLAEKLGNKEAVVYIPVRGGRIYFATHKVATGAVSIVFDQKQVWVCNADHVAAANIALTGKGIGEQSSDEENPDGSRIKLQLTS

SEQ ID NO: 63 - protein, 1054 aa, Artificial Sequence
  Synthetic sequence
MSSAIKSYKSVLRPNERKNQLLKSTIQCLEDGSAFFFKMLQGLFGGITPEIVRFSTEQEKQQQDIALWCAVNWFRPVSQDSLTHTIASDNLVEKFEEYYGGTASDAIKQYFSASIGESYYWNDCRQQYYDLCRELGVEVSDLTHDLEILCREKCLAVATESNQNNSIISVLFGTGEKEDRSVKLRITKKILEAISNLKEIPKNVAPIQEIILNVAKATKETFRQVYAGNLGAPSTLEKFIAKDGQKEFDLKKLQTDLKKVIRGKSKERDWCCQEELRSYVEQNTIQYDLWAWGEMFNKAHTALKIKSTRNYNFAKQRLEQFKEIQSLNNLLVVKKLNDFFDSEFFSGEETYTICVHHLGGKDLSKLYKAWEDDPADPENAIVVLCDDLKNNFKKEPIRNILRYIFTIRQECSAQDILAAAKYNQQLDRYKSQKANPSVLGNQGFTWTNAVILPEKAQRNDRPNSLDLRIWLYLKLRHPDGRWKKHHIPFYDTRFFQEIYAAGNSPVDTCQFRTPRFGYHLPKLTDQTAIRVNKKHVKAAKTEARIRLAIQQGTLPVSNLKITEISATINSKGQVRIPVKFRVGRQKGTLQIGDRFCGYDQNQTASHAYSLWEVVKEGQYHKELGCRVRFISSGDIVSITENRGNQFDQLSYEGLAYPQYADWRKKASKFVSLWQITKKNKKKEIVTVEAKEKFDAICKYQPRLYKFNKEYAYLLRDIVRGKSLVELQQIRQEIFRFIEQDCGVTRLGSLSLSTLETVKAVKGIIYSYFSTALNASKNNPISDEQRKEFDPELFALLEKLELIRTRKKKQKVERIANSLIQTCLENNIKFIRGEGDLSTTNNATKKKANSRSMDWLARGVFNKIRQLAPMHNITLFGCGSLYTSHQDPLVHRNPDKAMKCRWAAIPVKDIGRWVLRKLSQNLRAKNRGTGEYYHQGVKEFLSHYELQDLEEELLKWRSDRKSNIPCWVLQNRLAEKLGNKEAVVYIPVRGGRIYFATHKVATGAVSIVFDQKQVWVCNADHVAAANIALTGKGIGEQSSDEENPDGSRIKLQLTS

SEQ ID NO: 64 - protein, 1054 aa, Artificial Sequence
  Synthetic sequence
MSSAIKSYKSVLRPNERKNQLLKSTIQCLEDGSAFFFKMLQGLFGGITPEIVRFSTEQEKQQQDIALWCAVNWFRPVSQDSLTHTIASDNLVEKFEEYYGGTASDAIKQYFSASIGESYYWNDCRQQYYDLCRELGVEVSDLTHDLEILCREKCLAVATESNQNNSIISVLFGTGEKEDRSVKLRITKKILEAISNLKEIPKNVAPIQEIILNVAKATKETFRQVYAGNLGAPSTLEKFIAKDGQKEFDLKKLQTDLKKVIRGKSKERDWCCQEELRSYVEQNTIQYDLWAWGEMFNKAHTALKIKSTRNYNFAKQRLEQFKEIQSLNNLLVVKKLNDFFDSEFFSGEETYTICVHHLGGKDLSKLYKAWEDDPADPENAIVVLCDDLKNNFKKEPIRNILRYIFTIRQECSAQDILAAAKYNQQLDRYKSQKANPSVLGNQGFTWTNAVILPEKAQRNDRPNSLDLRIWLYLKLRHPDGRWKKHHIPFYDTRFFQEIYAAGNSPVDTCQFRTPRFGYHLPKLTDQTAIRVNKKHVKAAKTEARIRLAIQQGTLPVSNLKITEISATINSKGQVRIPVKFRVGRQKGTLQIGDRFCGYDQNQTASHAYSLWEVVKEGQYHKELGCFVRFISSRDIVSITENRGNQFDQLSYEGLAYPQYADWRKKASKFVSLWQITKKNKKKEIVTVEAKEKFDAICKYQPRLYKFNKEYAYLLRDIVRGKSLVELQQIRQEIFRFIEQDCGVTRLGSLSLSTLETVKAVKGIIYSYFSTALNASKNNPISDEQRKEFDPELFALLEKLELIRTRKKKQKVERIANSLIQTCLENNIKFIRGEGDLSTTNNATKKKANSRSMDWLARGVFNKIRQLAPMHNITLFGCGSLYTSHQDPLVHRNPDKAMKCRWAAIPVKDIGRWVLRKLSQNLRAKNRGTGEYYHQGVKEFLSHYELQDLEEELLKWRSDRKSNIPCWVLQNRLAEKLGNKEAVVYIPVRGGRIYFATHKVATGAVSIVFDQKQVWVCNADHVAAANIALTGKGIGEQSSDEENPDGSRIKLQLTS

SEQ ID NO: 65 - protein, 1054 aa, Artificial Sequence
  Synthetic sequence
MSSAIKSYKSVLRPNERKNQLLKSTIQCLEDGSAFFFKMLQGLFGGITPEIVRFSTEQEKQQQDIALWCAVNWFRPVSQDSLTHTIASDNLVEKFEEYYGGTASDAIKQYFSASIGESYYWNDCRQQYYDLCRELGVEVSDLTHDLEILCREKCLAVATESNQNNSIISVLFGTGEKEDRSVKLRITKKILEAISNLKEIPKNVAPIQEIILNVAKATKETFRQVYAGNLGAPSTLEKFIAKDGQKEFDLKKLQTDLKKVIRGKSKERDWCCQEELRSYVEQNTIQYDLWAWGEMFNKAHTALKIKSTRNYNFAKQRLEQFKEIQSLNNLLVVKKLNDFFDSEFFSGEETYTICVHHLGGKDLSKLYKAWEDDPADPENAIVVLCDDLKNNFKKEPIRNILRYIFTIRQECSAQDILAAAKYNQQLDRYKSQKANPSVLGNQGFTWTNAVILPEKAQRNDRPNSLDLRIWLYLKLRHPDGRWKKHHIPFYDTRFFQEIYAAGNSPVDTCQFRTPRFGYHLPKLTDQTAIRVNKKHVKAAKTEARIRLAIQQGTLPVSNLKITEISATINSKGQVRIPVKFRVGRQKGTLQIGDRFCGYDQNQTASHAYSLWEVVKEGQYHKELGCFVRFISSGDIVSITENRGNQFDQLSYEGRAYPQYADWRKKASKFVSLWQITKKNKKKEIVTVEAKEKFDAICKYQPRLYKFNKEYAYLLRDIVRGKSLVELQQIRQEIFRFIEQDCGVTRLGSLSLSTLETVKAVKGIIYSYFSTALNASKNNPISDEQRKEFDPELFALLEKLELIRTRKKKQKVERIANSLIQTCLENNIKFIRGEGDLSTTNNATKKKANSRSMDWLARGVFNKIRQLAPMHNITLFGCGSLYTSHQDPLVHRNPDKAMKCRWAAIPVKDIGRWVLRKLSQNLRAKNRGTGEYYHQGVKEFLSHYELQDLEEELLKWRSDRKSNIPCWVLQNRLAEKLGNKEAVVYIPVRGGRIYFATHKVATGAVSIVFDQKQVWVCNADHVAAANIALTGKGIGEQSSDEENPDGSRIKLQLTS

SEQ ID NO: 66 - protein, 1054 aa, Artificial Sequence
  Synthetic sequence
MSSAIKSYKSVLRPNERKNQLLKSTIQCLEDGSAFFFKMLQGLFGGITPEIVRFSTEQEKQQQDIALWCAVNWFRPVSQDSLTHTIASDNLVEKFEEYYGGTASDAIKQYFSASIGESYYWNDCRQQYYDLCRELGVEVSDLTHDLEILCREKCLAVATESNQNNSIISVLFGTGEKEDRSVKLRITKKILEAISNLKEIPKNVAPIQEIILNVAKATKETFRQVYAGNLGAPSTLEKFIAKDGQKEFDLKKLQTDLKKVIRGKSKERDWCCQEELRSYVEQNTIQYDLWAWGEMFNKAHTALKIKSTRNYNFAKQRLEQFKEIQSLNNLLVVKKLNDFFDSEFFSGEETYTICVHHLGGKDLSKLYKAWEDDPADPENAIVVLCDDLKNNFKKEPIRNILRYIFTIRQECSAQDILAAAKYNQQLDRYKSQKANPSVLGNQGFTWTNAVILPEKAQRNDRPNSLDLRIWLYLKLRHPDGRWKKHHIPFYDTRFFQEIYAAGNSPVDTCQFRTPRFGYHLPKLTDQTAIRVNKKHVKAAKTEARIRLAIQQGTLPVSNLKITEISATINSKGQVRIPVKFRVGRQKGTLQIGDRFCGYDQNQTASHAYSLWEVVKEGQYHKELGCFVRFISSGDIVSITENRGNQFDQLSYEGLAYPQYADWRKKASKFVSLWRITKKNKKKEIVTVEAKEKFDAICKYQPRLYKFNKEYAYLLRDIVRGKSLVELQQIRQEIFRFIEQDCGVTRLGSLSLSTLETVKAVKGIIYSYFSTALNASKNNPISDEQRKEFDPELFALLEKLELIRTRKKKQKVERIANSLIQTCLENNIKFIRGEGDLSTTNNATKKKANSRSMDWLARGVFNKIRQLAPMHNITLFGCGSLYTSHQDPLVHRNPDKAMKCRWAAIPVKDIGRWVLRKLSQNLRAKNRGTGEYYHQGVKEFLSHYELQDLEEELLKWRSDRKSNIPCWVLQNRLAEKLGNKEAVVYIPVRGGRIYFATHKVATGAVSIVFDQKQVWVCNADHVAAANIALTGKGIGEQSSDEENPDGSRIKLQLTS

SEQ ID NO: 67 - protein, 1054 aa, Artificial Sequence
  Synthetic sequence
MSSAIKSYKSVLRPNERKNQLLKSTIQCLEDGSAFFFKMLQGLFGGITPEIVRFSTEQEKQQQDIALWCAVNWFRPVSQDSLTHTIASDNLVEKFEEYYGGTASDAIKQYFSASIGESYYWNDCRQQYYDLCRELGVEVSDLTHDLEILCREKCLAVATESNQNNSIISVLFGTGEKEDRSVKLRITKKILEAISNLKEIPKNVAPIQEIILNVAKATKETFRQVYAGNLGAPSTLEKFIAKDGQKEFDLKKLQTDLKKVIRGKSKERDWCCQEELRSYVEQNTIQYDLWAWGEMFNKAHTALKIKSTRNYNFAKQRLEQFKEIQSLNNLLVVKKLNDFFDSEFFSGEETYTICVHHLGGKDLSKLYKAWEDDPADPENAIVVLCDDLKNNFKKEPIRNILRYIFTIRQECSAQDILAAAKYNQQLDRYKSQKANPSVLGNQGFTWTNAVILPEKAQRNDRPNSLDLRIWLYLKLRHPDGRWKKHHIPFYDTRFFQEIYAAGNSPVDTCQFRTPRFGYHLPKLTDQTAIRVNKKHVKAAKTEARIRLAIQQGTLPVSNLKITEISATINSKGQVRIPVKFRVGRQKGTLQIGDRFCGYDQNQTASHAYSLWEVVKEGQYHKELGCFVRFISSGDIVSITENRGNQFDQLSYEGLAYPQYADWRKKASKFVSLWQIRKKNKKKEIVTVEAKEKFDAICKYQPRLYKFNKEYAYLLRDIVRGKSLVELQQIRQEIFRFIEQDCGVTRLGSLSLSTLETVKAVKGIIYSYFSTALNASKNNPISDEQRKEFDPELFALLEKLELIRTRKKKQKVERIANSLIQTCLENNIKFIRGEGDLSTTNNATKKKANSRSMDWLARGVFNKIRQLAPMHNITLFGCGSLYTSHQDPLVHRNPDKAMKCRWAAIPVKDIGRWVLRKLSQNLRAKNRGTGEYYHQGVKEFLSHYELQDLEEELLKWRSDRKSNIPCWVLQNRLAEKLGNKEAVVYIPVRGGRIYFATHKVATGAVSIVFDQKQVWVCNADHVAAANIALTGKGIGEQSSDEENPDGSRIKLQLTS

SEQ ID NO: 68 - protein, 1054 aa, Artificial Sequence
  Synthetic sequence
MSSAIKSYKSVLRPNERKNQLLKSTIQCLEDGSAFFFKMLQGLFGGITPEIVRFSTEQEKQQQDIALWCAVNWFRPVSQDSLTHTIASDNLVEKFEEYYGGTASDAIKQYFSASIGESYYWNDCRQQYYDLCRELGVEVSDLTHDLEILCREKCLAVATESNQNNSIISVLFGTGEKEDRSVKLRITKKILEAISNLKEIPKNVAPIQEIILNVAKATKETFRQVYAGNLGAPSTLEKFIAKDGQKEFDLKKLQTDLKKVIRGKSKERDWCCQEELRSYVEQNTIQYDLWAWGEMFNKAHTALKIKSTRNYNFAKQRLEQFKEIQSLNNLLVVKKLNDFFDSEFFSGEETYTICVHHLGGKDLSKLYKAWEDDPADPENAIVVLCDDLKNNFKKEPIRNILRYIFTIRQECSAQDILAAAKYNQQLDRYKSQKANPSVLGNQGFTWTNAVILPEKAQRNDRPNSLDLRIWLYLKLRHPDGRWKKHHIPFYDTRFFQEIYAAGNSPVDTCQFRTPRFGYHLPKLTDQTAIRVNKKHVKAAKTEARIRLAIQQGTLPVSNLKITEISATINSKGQVRIPVKFRVGRQKGTLQIGDRFCGYDQNQTASHAYSLWEVVKEGQYHKELGCFVRFISSGDIVSITENRGNQFDQLSYEGLAYPQYADWRKKASKFVSLWQITRKNKKKEIVTVEAKEKFDAICKYQPRLYKFNKEYAYLLRDIVRGKSLVELQQIRQEIFRFIEQDCGVTRLGSLSLSTLETVKAVKGIIYSYFSTALNASKNNPISDEQRKEFDPELFALLEKLELIRTRKKKQKVERIANSLIQTCLENNIKFIRGEGDLSTTNNATKKKANSRSMDWLARGVFNKIRQLAPMHNITLFGCGSLYTSHQDPLVHRNPDKAMKCRWAAIPVKDIGRWVLRKLSQNLRAKNRGTGEYYHQGVKEFLSHYELQDLEEELLKWRSDRKSNIPCWVLQNRLAEKLGNKEAVVYIPVRGGRIYFATHKVATGAVSIVFDQKQVWVCNADHVAAANIALTGKGIGEQSSDEENPDGSRIKLQLTS

SEQ ID NO: 69 - protein, 1054 aa, Artificial Sequence
  Synthetic sequence
MSSAIKSYKSVLRPNERKNQLLKSTIQCLEDGSAFFFKMLQGLFGGITPEIVRFSTEQEKQQQDIALWCAVNWFRPVSQDSLTHTIASDNLVEKFEEYYGGTASDAIKQYFSASIGESYYWNDCRQQYYDLCRELGVEVSDLTHDLEILCREKCLAVATESNQNNSIISVLFGTGEKEDRSVKLRITKKILEAISNLKEIPKNVAPIQEIILNVAKATKETFRQVYAGNLGAPSTLEKFIAKDGQKEFDLKKLQTDLKKVIRGKSKERDWCCQEELRSYVEQNTIQYDLWAWGEMFNKAHTALKIKSTRNYNFAKQRLEQFKEIQSLNNLLVVKKLNDFFDSEFFSGEETYTICVHHLGGKDLSKLYKAWEDDPADPENAIVVLCDDLKNNFKKEPIRNILRYIFTIRQECSAQDILAAAKYNQQLDRYKSQKANPSVLGNQGFTWTNAVILPEKAQRNDRPNSLDLRIWLYLKLRHPDGRWKKHHIPFYDTRFFQEIYAAGNSPVDTCQFRTPRFGYHLPKLTDQTAIRVNKKHVKAAKTEARIRLAIQQGTLPVSNLKITEISATINSKGQVRIPVKFRVGRQKGTLQIGDRFCGYDQNQTASHAYSLWEVVKEGQYHKELGCFVRFISSGDIVSITENRGNQFDQLSYEGLAYPQYADWRKKASKFVSLWQITKKGKKKEIVTVEAKEKFDAICKYQPRLYKFNKEYAYLLRDIVRGKSLVELQQIRQEIFRFIEQDCGVTRLGSLSLSTLETVKAVKGIIYSYFSTALNASKNNPISDEQRKEFDPELFALLEKLELIRTRKKKQKVERIANSLIQTCLENNIKFIRGEGDLSTTNNATKKKANSRSMDWLARGVFNKIRQLAPMHNITLFGCGSLYTSHQDPLVHRNPDKAMKCRWAAIPVKDIGRWVLRKLSQNLRAKNRGTGEYYHQGVKEFLSHYELQDLEEELLKWRSDRKSNIPCWVLQNRLAEKLGNKEAVVYIPVRGGRIYFATHKVATGAVSIVFDQKQVWVCNADHVAAANIALTGKGIGEQSSDEENPDGSRIKLQLTS

SEQ ID NO: 70 - protein, 1054 aa, Artificial Sequence
  Synthetic sequence
MSSAIKSYKSVLRPNERKNQLLKSTIQCLEDGSAFFFKMLQGLFGGITPEIVRFSTEQEKQQQDIALWCAVNWFRPVSQDSLTHTIASDNLVEKFEEYYGGTASDAIKQYFSASIGESYYWNDCRQQYYDLCRELGVEVSDLTHDLEILCREKCLAVATESNQNNSIISVLFGTGEKEDRSVKLRITKKILEAISNLKEIPKNVAPIQEIILNVAKATKETFRQVYAGNLGAPSTLEKFIAKDGQKEFDLKKLQTDLKKVIRGKSKERDWCCQEELRSYVEQNTIQYDLWAWGEMFNKAHTALKIKSTRNYNFAKQRLEQFKEIQSLNNLLVVKKLNDFFDSEFFSGEETYTICVHHLGGKDLSKLYKAWEDDPADPENAIVVLCDDLKNNFKKEPIRNILRYIFTIRQECSAQDILAAAKYNQQLDRYKSQKANPSVLGNQGFTWTNAVILPEKAQRNDRPNSLDLRIWLYLKLRHPDGRWKKHHIPFYDTRFFQEIYAAGNSPVDTCQFRTPRFGYHLPKLTDQTAIRVNKKHVKAAKTEARIRLAIQQGTLPVSNLKITEISATINSKGQVRIPVKFRVGRQKGTLQIGDRFCGYDQNQTASHAYSLWEVVKEGQYHKELGCFVRFISSGDIVSITENRGNQFDQLSYEGLAYPQYADWRKKASKFVSLWQITKKNKKKEIVTVEGKEKFDAICKYQPRLYKFNKEYAYLLRDIVRGKSLVELQQIRQEIFRFIEQDCGVTRLGSLSLSTLETVKAVKGIIYSYFSTALNASKNNPISDEQRKEFDPELFALLEKLELIRTRKKKQKVERIANSLIQTCLENNIKFIRGEGDLSTTNNATKKKANSRSMDWLARGVFNKIRQLAPMHNITLFGCGSLYTSHQDPLVHRNPDKAMKCRWAAIPVKDIGRWVLRKLSQNLRAKNRGTGEYYHQGVKEFLSHYELQDLEEELLKWRSDRKSNIPCWVLQNRLAEKLGNKEAVVYIPVRGGRIYFATHKVATGAVSIVFDQKQVWVCNADHVAAANIALTGKGIGEQSSDEENPDGSRIKLQLTS

SEQ ID NO: 71 - protein, 1054 aa, Artificial Sequence
  Synthetic sequence
MSSAIKSYKSVLRPNERKNQLLKSTIQCLEDGSAFFFKMLQGLFGGITPEIVRFSTEQEKQQQDIALWCAVNWFRPVSQDSLTHTIASDNLVEKFEEYYGGTASDAIKQYFSASIGESYYWNDCRQQYYDLCRELGVEVSDLTHDLEILCREKCLAVATESNQNNSIISVLFGTGEKEDRSVKLRITKKILEAISNLKEIPKNVAPIQEIILNVAKATKETFRQVYAGNLGAPSTLEKFIAKDGQKEFDLKKLQTDLKKVIRGKSKERDWCCQEELRSYVEQNTIQYDLWAWGEMFNKAHTALKIKSTRNYNFAKQRLEQFKEIQSLNNLLVVKKLNDFFDSEFFSGEETYTICVHHLGGKDLSKLYKAWEDDPADPENAIVVLCDDLKNNFKKEPIRNILRYIFTIRQECSAQDILAAAKYNQQLDRYKSQKANPSVLGNQGFTWTNAVILPEKAQRNDRPNSLDLRIWLYLKLRHPDGRWKKHHIPFYDTRFFQEIYAAGNSPVDTCQFRTPRFGYHLPKLTDQTAIRVNKKHVKAAKTEARIRLAIQQGTLPVSNLKITEISATINSKGQVRIPVKFRVGRQKGTLQIGDRFCGYDQNQTASHAYSLWEVVKEGQYHKELGCFVRFISSGDIVSITENRGNQFDQLSYEGLAYPQYADWRKKASKFVSLWQITKKNKKKEIVTVEAKEGFDAICKYQPRLYKFNKEYAYLLRDIVRGKSLVELQQIRQEIFRFIEQDCGVTRLGSLSLSTLETVKAVKGIIYSYFSTALNASKNNPISDEQRKEFDPELFALLEKLELIRTRKKKQKVERIANSLIQTCLENNIKFIRGEGDLSTTNNATKKKANSRSMDWLARGVFNKIRQLAPMHNITLFGCGSLYTSHQDPLVHRNPDKAMKCRWAAIPVKDIGRWVLRKLSQNLRAKNRGTGEYYHQGVKEFLSHYELQDLEEELLKWRSDRKSNIPCWVLQNRLAEKLGNKEAVVYIPVRGGRIYFATHKVATGAVSIVFDQKQVWVCNADHVAAANIALTGKGIGEQSSDEENPDGSRIKLQLTS

SEQ ID NO: 72 - protein, 1054 aa, Artificial Sequence
  Synthetic sequence
MSSAIKSYKSVLRPNERKNQLLKSTIQCLEDGSAFFFKMLQGLFGGITPEIVRFSTEQEKQQQDIALWCAVNWFRPVSQDSLTHTIASDNLVEKFEEYYGGTASDAIKQYFSASIGESYYWNDCRQQYYDLCRELGVEVSDLTHDLEILCREKCLAVATESNQNNSIISVLFGTGEKEDRSVKLRITKKILEAISNLKEIPKNVAPIQEIILNVAKATKETFRQVYAGNLGAPSTLEKFIAKDGQKEFDLKKLQTDLKKVIRGKSKERDWCCQEELRSYVEQNTIQYDLWAWGEMFNKAHTALKIKSTRNYNFAKQRLEQFKEIQSLNNLLVVKKLNDFFDSEFFSGEETYTICVHHLGGKDLSKLYKAWEDDPADPENAIVVLCDDLKNNFKKEPIRNILRYIFTIRQECSAQDILAAAKYNQQLDRYKSQKANPSVLGNQGFTWTNAVILPEKAQRNDRPNSLDLRIWLYLKLRHPDGRWKKHHIPFYDTRFFQEIYAAGNSPVDTCQFRTPRFGYHLPKLTDQTAIRVNKKHVKAAKTEARIRLAIQQGTLPVSNLKITEISATINSKGQVRIPVKFRVGRQKGTLQIGDRFCGYDQNQTASHAYSLWEVVKEGQYHKELGCFVRFISSGDIVSITENRGNQFDQLSYEGLAYPQYADWRKKASKFVSLWQITKKNKKKEIVTVEAKEKFDAICKYQPRLYKFNKEYAYLLRDIVRGKSLVELGQIRQEIFRFIEQDCGVTRLGSLSLSTLETVKAVKGIIYSYFSTALNASKNNPISDEQRKEFDPELFALLEKLELIRTRKKKQKVERIANSLIQTCLENNIKFIRGEGDLSTTNNATKKKANSRSMDWLARGVFNKIRQLAPMHNITLFGCGSLYTSHQDPLVHRNPDKAMKCRWAAIPVKDIGRWVLRKLSQNLRAKNRGTGEYYHQGVKEFLSHYELQDLEEELLKWRSDRKSNIPCWVLQNRLAEKLGNKEAVVYIPVRGGRIYFATHKVATGAVSIVFDQKQVWVCNADHVAAANIALTGKGIGEQSSDEENPDGSRIKLQLTS

SEQ ID NO: 73 - protein, 1054 aa, Artificial Sequence
  Synthetic sequence
MSSAIKSYKSVLRPNERKNQLLKSTIQCLEDGSAFFFKMLQGLFGGITPEIVRFSTEQEKQQQDIALWCAVNWFRPVSQDSLTHTIASDNLVEKFEEYYGGTASDAIKQYFSASIGESYYWNDCRQQYYDLCRELGVEVSDLTHDLEILCREKCLAVATESNQNNSIISVLFGTGEKEDRSVKLRITKKILEAISNLKEIPKNVAPIQEIILNVAKATKETFRQVYAGNLGAPSTLEKFIAKDGQKEFDLKKLQTDLKKVIRGKSKERDWCCQEELRSYVEQNTIQYDLWAWGEMFNKAHTALKIKSTRNYNFAKQRLEQFKEIQSLNNLLVVKKLNDFFDSEFFSGEETYTICVHHLGGKDLSKLYKAWEDDPADPENAIVVLCDDLKNNFKKEPIRNILRYIFTIRQECSAQDILAAAKYNQQLDRYKSQKANPSVLGNQGFTWTNAVILPEKAQRNDRPNSLDLRIWLYLKLRHPDGRWKKHHIPFYDTRFFQEIYAAGNSPVDTCQFRTPRFGYHLPKLTDQTAIRVNKKHVKAAKTEARIRLAIQQGTLPVSNLKITEISATINSKGQVRIPVKFRVGRQKGTLQIGDRFCGYDQNQTASHAYSLWEVVKEGQYHKELGCFVRFISSGDIVSITENRGNQFDQLSYEGLAYPQYADWRKKASKFVSLWQITKKNKKKEIVTVEAKEKFDAICKYQPRLYKFNKEYAYLLRDIVRGKSLVELQGIRQEIFRFIEQDCGVTRLGSLSLSTLETVKAVKGIIYSYFSTALNASKNNPISDEQRKEFDPELFALLEKLELIRTRKKKQKVERIANSLIQTCLENNIKFIRGEGDLSTTNNATKKKANSRSMDWLARGVFNKIRQLAPMHNITLFGCGSLYTSHQDPLVHRNPDKAMKCRWAAIPVKDIGRWVLRKLSQNLRAKNRGTGEYYHQGVKEFLSHYELQDLEEELLKWRSDRKSNIPCWVLQNRLAEKLGNKEAVVYIPVRGGRIYFATHKVATGAVSIVFDQKQVWVCNADHVAAANIALTGKGIGEQSSDEENPDGSRIKLQLTS

SEQ ID NO: 74 - protein, 1054 aa, Artificial Sequence
  Synthetic sequence
MSSAIKSYKSVLRPNERKNQLLKSTIQCLEDGSAFFFKMLQGLFGGITPEIVRFSTEQEKQQQDIALWCAVNWFRPVSQDSLTHTIASDNLVEKFEEYYGGTASDAIKQYFSASIGESYYWNDCRQQYYDLCRELGVEVSDLTHDLEILCREKCLAVATESNQNNSIISVLFGTGEKEDRSVKLRITKKILEAISNLKEIPKNVAPIQEIILNVAKATKETFRQVYAGNLGAPSTLEKFIAKDGQKEFDLKKLQTDLKKVIRGKSKERDWCCQEELRSYVEQNTIQYDLWAWGEMFNKAHTALKIKSTRNYNFAKQRLEQFKEIQSLNNLLVVKKLNDFFDSEFFSGEETYTICVHHLGGKDLSKLYKAWEDDPADPENAIVVLCDDLKNNFKKEPIRNILRYIFTIRQECSAQDILAAAKYNQQLDRYKSQKANPSVLGNQGFTWTNAVILPEKAQRNDRPNSLDLRIWLYLKLRHPDGRWKKHHIPFYDTRFFQEIYAAGNSPVDTCQFRTPRFGYHLPKLTDQTAIRVNKKHVKAAKTEARIRLAIQQGTLPVSNLKITEISATINSKGQVRIPVKFRVGRQKGTLQIGDRFCGYDQNQTASHAYSLWEVVKEGQYHKELGCFVRFISSGDIVSITENRGNQFDQLSYEGLAYPQYADWRKKASKFVSLWQITKKNKKKEIVTVEAKEKFDAICKYQPRLYKFNKEYAYLLRDIVRGKSLVELQQIRQEIFRFIEGDCGVTRLGSLSLSTLETVKAVKGIIYSYFSTALNASKNNPISDEQRKEFDPELFALLEKLELIRTRKKKQKVERIANSLIQTCLENNIKFIRGEGDLSTTNNATKKKANSRSMDWLARGVFNKIRQLAPMHNITLFGCGSLYTSHQDPLVHRNPDKAMKCRWAAIPVKDIGRWVLRKLSQNLRAKNRGTGEYYHQGVKEFLSHYELQDLEEELLKWRSDRKSNIPCWVLQNRLAEKLGNKEAVVYIPVRGGRIYFATHKVATGAVSIVFDQKQVWVCNADHVAAANIALTGKGIGEQSSDEENPDGSRIKLQLTS

SEQ ID NO: 75 - protein, 1054 aa, Artificial Sequence
  Synthetic sequence
MSSAIKSYKSVLRPNERKNQLLKSTIQCLEDGSAFFFKMLQGLFGGITPEIVRFSTEQEKQQQDIALWCAVNWFRPVSQDSLTHTIASDNLVEKFEEYYGGTASDAIKQYFSASIGESYYWNDCRQQYYDLCRELGVEVSDLTHDLEILCREKCLAVATESNQNNSIISVLFGTGEKEDRSVKLRITKKILEAISNLKEIPKNVAPIQEIILNVAKATKETFRQVYAGNLGAPSTLEKFIAKDGQKEFDLKKLQTDLKKVIRGKSKERDWCCQEELRSYVEQNTIQYDLWAWGEMFNKAHTALKIKSTRNYNFAKQRLEQFKEIQSLNNLLVVKKLNDFFDSEFFSGEETYTICVHHLGGKDLSKLYKAWEDDPADPENAIVVLCDDLKNNFKKEPIRNILRYIFTIRQECSAQDILAAAKYNQQLDRYKSQKANPSVLGNQGFTWTNAVILPEKAQRNDRPNSLDLRIWLYLKLRHPDGRWKKHHIPFYDTRFFQEIYAAGNSPVDTCQFRTPRFGYHLPKLTDQTAIRVNKKHVKAAKTEARIRLAIQQGTLPVSNLKITEISATINSKGQVRIPVKFRVGRQKGTLQIGDRFCGYDQNQTASHAYSLWEVVKEGQYHKELGCFVRFISSGDIVSITENRGNQFDQLSYEGLAYPQYADWRKKASKFVSLWQITKKNKKKEIVTVEAKEKFDAICKYQPRLYKFNKEYAYLLRDIVRGKSLVELQQIRQEIFRFIEQDCGVTRLGSLSLSTGETVKAVKGIIYSYFSTALNASKNNPISDEQRKEFDPELFALLEKLELIRTRKKKQKVERIANSLIQTCLENNIKFIRGEGDLSTTNNATKKKANSRSMDWLARGVFNKIRQLAPMHNITLFGCGSLYTSHQDPLVHRNPDKAMKCRWAAIPVKDIGRWVLRKLSQNLRAKNRGTGEYYHQGVKEFLSHYELQDLEEELLKWRSDRKSNIPCWVLQNRLAEKLGNKEAVVYIPVRGGRIYFATHKVATGAVSIVFDQKQVWVCNADHVAAANIALTGKGIGEQSSDEENPDGSRIKLQLTS

SEQ ID NO: 76 - protein, 1054 aa, Artificial Sequence
  Synthetic sequence
MSSAIKSYKSVLRPNERKNQLLKSTIQCLEDGSAFFFKMLQGLFGGITPEIVRFSTEQEKQQQDIALWCAVNWFRPVSQDSLTHTIASDNLVEKFEEYYGGTASDAIKQYFSASIGESYYWNDCRQQYYDLCRELGVEVSDLTHDLEILCREKCLAVATESNQNNSIISVLFGTGEKEDRSVKLRITKKILEAISNLKEIPKNVAPIQEIILNVAKATKETFRQVYAGNLGAPSTLEKFIAKDGQKEFDLKKLQTDLKKVIRGKSKERDWCCQEELRSYVEQNTIQYDLWAWGEMFNKAHTALKIKSTRNYNFAKQRLEQFKEIQSLNNLLVVKKLNDFFDSEFFSGEETYTICVHHLGGKDLSKLYKAWEDDPADPENAIVVLCDDLKNNFKKEPIRNILRYIFTIRQECSAQDILAAAKYNQQLDRYKSQKANPSVLGNQGFTWTNAVILPEKAQRNDRPNSLDLRIWLYLKLRHPDGRWKKHHIPFYDTRFFQEIYAAGNSPVDTCQFRTPRFGYHLPKLTDQTAIRVNKKHVKAAKTEARIRLAIQQGTLPVSNLKITEISATINSKGQVRIPVKFRVGRQKGTLQIGDRFCGYDQNQTASHAYSLWEVVKEGQYHKELGCFVRFISSGDIVSITENRGNQFDQLSYEGLAYPQYADWRKKASKFVSLWQITKKNKKKEIVTVEAKEKFDAICKYQPRLYKFNKEYAYLLRDIVRGKSLVELQQIRQEIFRFIEQDCGVTRLGSLSLSTLEGVKAVKGIIYSYFSTALNASKNNPISDEQRKEFDPELFALLEKLELIRTRKKKQKVERIANSLIQTCLENNIKFIRGEGDLSTTNNATKKKANSRSMDWLARGVFNKIRQLAPMHNITLFGCGSLYTSHQDPLVHRNPDKAMKCRWAAIPVKDIGRWVLRKLSQNLRAKNRGTGEYYHQGVKEFLSHYELQDLEEELLKWRSDRKSNIPCWVLQNRLAEKLGNKEAVVYIPVRGGRIYFATHKVATGAVSIVFDQKQVWVCNADHVAAANIALTGKGIGEQSSDEENPDGSRIKLQLTS

SEQ ID NO: 77 - protein, 1054 aa, Artificial Sequence
  Synthetic sequence
MSSAIKSYKSVLRPNERKNQLLKSTIQCLEDGSAFFFKMLQGLFGGITPEIVRFSTEQEKQQQDIALWCAVNWFRPVSQDSLTHTIASDNLVEKFEEYYGGTASDAIKQYFSASIGESYYWNDCRQQYYDLCRELGVEVSDLTHDLEILCREKCLAVATESNQNNSIISVLFGTGEKEDRSVKLRITKKILEAISNLKEIPKNVAPIQEIILNVAKATKETFRQVYAGNLGAPSTLEKFIAKDGQKEFDLKKLQTDLKKVIRGKSKERDWCCQEELRSYVEQNTIQYDLWAWGEMFNKAHTALKIKSTRNYNFAKQRLEQFKEIQSLNNLLVVKKLNDFFDSEFFSGEETYTICVHHLGGKDLSKLYKAWEDDPADPENAIVVLCDDLKNNFKKEPIRNILRYIFTIRQECSAQDILAAAKYNQQLDRYKSQKANPSVLGNQGFTWTNAVILPEKAQRNDRPNSLDLRIWLYLKLRHPDGRWKKHHIPFYDTRFFQEIYAAGNSPVDTCQFRTPRFGYHLPKLTDQTAIRVNKKHVKAAKTEARIRLAIQQGTLPVSNLKITEISATINSKGQVRIPVKFRVGRQKGTLQIGDRFCGYDQNQTASHAYSLWEVVKEGQYHKELGCFVRFISSGDIVSITENRGNQFDQLSYEGLAYPQYADWRKKASKFVSLWQITKKNKKKEIVTVEAKEKFDAICKYQPRLYKFNKEYAYLLRDIVRGKSLVELQQIRQEIFRFIEQDCGVTRLGSLSLSTLETVKAVKRIIYSYFSTALNASKNNPISDEQRKEFDPELFALLEKLELIRTRKKKQKVERIANSLIQTCLENNIKFIRGEGDLSTTNNATKKKANSRSMDWLARGVFNKIRQLAPMHNITLFGCGSLYTSHQDPLVHRNPDKAMKCRWAAIPVKDIGRWVLRKLSQNLRAKNRGTGEYYHQGVKEFLSHYELQDLEEELLKWRSDRKSNIPCWVLQNRLAEKLGNKEAVVYIPVRGGRIYFATHKVATGAVSIVFDQKQVWVCNADHVAAANIALTGKGIGEQSSDEENPDGSRIKLQLTS

SEQ ID NO: 78 - protein, 1054 aa, Artificial Sequence
  Synthetic sequence
MSSAIKSYKSVLRPNERKNQLLKSTIQCLEDGSAFFFKMLQGLFGGITPEIVRFSTEQEKQQQDIALWCAVNWFRPVSQDSLTHTIASDNLVEKFEEYYGGTASDAIKQYFSASIGESYYWNDCRQQYYDLCRELGVEVSDLTHDLEILCREKCLAVATESNQNNSIISVLFGTGEKEDRSVKLRITKKILEAISNLKEIPKNVAPIQEIILNVAKATKETFRQVYAGNLGAPSTLEKFIAKDGQKEFDLKKLQTDLKKVIRGKSKERDWCCQEELRSYVEQNTIQYDLWAWGEMFNKAHTALKIKSTRNYNFAKQRLEQFKEIQSLNNLLVVKKLNDFFDSEFFSGEETYTICVHHLGGKDLSKLYKAWEDDPADPENAIVVLCDDLKNNFKKEPIRNILRYIFTIRQECSAQDILAAAKYNQQLDRYKSQKANPSVLGNQGFTWTNAVILPEKAQRNDRPNSLDLRIWLYLKLRHPDGRWKKHHIPFYDTRFFQEIYAAGNSPVDTCQFRTPRFGYHLPKLTDQTAIRVNKKHVKAAKTEARIRLAIQQGTLPVSNLKITEISATINSKGQVRIPVKFRVGRQKGTLQIGDRFCGYDQNQTASHAYSLWEVVKEGQYHKELGCFVRFISSGDIVSITENRGNQFDQLSYEGLAYPQYADWRKKASKFVSLWQITKKNKKKEIVTVEAKEKFDAICKYQPRLYKFNKEYAYLLRDIVRGKSLVELQQIRQEIFRFIEQDCGVTRLGSLSLSTLETVKAVKGIIYSYFSTALNASRNNPISDEQRKEFDPELFALLEKLELIRTRKKKQKVERIANSLIQTCLENNIKFIRGEGDLSTTNNATKKKANSRSMDWLARGVFNKIRQLAPMHNITLFGCGSLYTSHQDPLVHRNPDKAMKCRWAAIPVKDIGRWVLRKLSQNLRAKNRGTGEYYHQGVKEFLSHYELQDLEEELLKWRSDRKSNIPCWVLQNRLAEKLGNKEAVVYIPVRGGRIYFATHKVATGAVSIVFDQKQVWVCNADHVAAANIALTGKGIGEQSSDEENPDGSRIKLQLTS

SEQ ID NO: 79 - protein, 1054 aa, Artificial Sequence
  Synthetic sequence
MSSAIKSYKSVLRPNERKNQLLKSTIQCLEDGSAFFFKMLQGLFGGITPEIVRFSTEQEKQQQDIALWCAVNWFRPVSQDSLTHTIASDNLVEKFEEYYGGTASDAIKQYFSASIGESYYWNDCRQQYYDLCRELGVEVSDLTHDLEILCREKCLAVATESNQNNSIISVLFGTGEKEDRSVKLRITKKILEAISNLKEIPKNVAPIQEIILNVAKATKETFRQVYAGNLGAPSTLEKFIAKDGQKEFDLKKLQTDLKKVIRGKSKERDWCCQEELRSYVEQNTIQYDLWAWGEMFNKAHTALKIKSTRNYNFAKQRLEQFKEIQSLNNLLVVKKLNDFFDSEFFSGEETYTICVHHLGGKDLSKLYKAWEDDPADPENAIVVLCDDLKNNFKKEPIRNILRYIFTIRQECSAQDILAAAKYNQQLDRYKSQKANPSVLGNQGFTWTNAVILPEKAQRNDRPNSLDLRIWLYLKLRHPDGRWKKHHIPFYDTRFFQEIYAAGNSPVDTCQFRTPRFGYHLPKLTDQTAIRVNKKHVKAAKTEARIRLAIQQGTLPVSNLKITEISATINSKGQVRIPVKFRVGRQKGTLQIGDRFCGYDQNQTASHAYSLWEVVKEGQYHKELGCFVRFISSGDIVSITENRGNQFDQLSYEGLAYPQYADWRKKASKFVSLWQITKKNKKKEIVTVEAKEKFDAICKYQPRLYKFNKEYAYLLRDIVRGKSLVELQQIRQEIFRFIEQDCGVTRLGSLSLSTLETVKAVKGIIYSYFSTALNASKNNPISDEQRKEFDPELFALLEKLERIRTRKKKQKVERIANSLIQTCLENNIKFIRGEGDLSTTNNATKKKANSRSMDWLARGVFNKIRQLAPMHNITLFGCGSLYTSHQDPLVHRNPDKAMKCRWAAIPVKDIGRWVLRKLSQNLRAKNRGTGEYYHQGVKEFLSHYELQDLEEELLKWRSDRKSNIPCWVLQNRLAEKLGNKEAVVYIPVRGGRIYFATHKVATGAVSIVFDQKQVWVCNADHVAAANIALTGKGIGEQSSDEENPDGSRIKLQLTS

SEQ ID NO: 80 - protein, 1054 aa, Artificial Sequence
  Synthetic sequence
MSSAIKSYKSVLRPNERKNQLLKSTIQCLEDGSAFFFKMLQGLFGGITPEIVRFSTEQEKQQQDIALWCAVNWFRPVSQDSLTHTIASDNLVEKFEEYYGGTASDAIKQYFSASIGESYYWNDCRQQYYDLCRELGVEVSDLTHDLEILCREKCLAVATESNQNNSIISVLFGTGEKEDRSVKLRITKKILEAISNLKEIPKNVAPIQEIILNVAKATKETFRQVYAGNLGAPSTLEKFIAKDGQKEFDLKKLQTDLKKVIRGKSKERDWCCQEELRSYVEQNTIQYDLWAWGEMFNKAHTALKIKSTRNYNFAKQRLEQFKEIQSLNNLLVVKKLNDFFDSEFFSGEETYTICVHHLGGKDLSKLYKAWEDDPADPENAIVVLCDDLKNNFKKEPIRNILRYIFTIRQECSAQDILAAAKYNQQLDRYKSQKANPSVLGNQGFTWTNAVILPEKAQRNDRPNSLDLRIWLYLKLRHPDGRWKKHHIPFYDTRFFQEIYAAGNSPVDTCQFRTPRFGYHLPKLTDQTAIRVNKKHVKAAKTEARIRLAIQQGTLPVSNLKITEISATINSKGQVRIPVKFRVGRQKGTLQIGDRFCGYDQNQTASHAYSLWEVVKEGQYHKELGCFVRFISSGDIVSITENRGNQFDQLSYEGLAYPQYADWRKKASKFVSLWQITKKNKKKEIVTVEAKEKFDAICKYQPRLYKFNKEYAYLLRDIVRGKSLVELQQIRQEIFRFIEQDCGVTRLGSLSLSTLETVKAVKGIIYSYFSTALNASKNNPISDEQRKEFDPELFALLEKLELIGTRKKKQKVERIANSLIQTCLENNIKFIRGEGDLSTTNNATKKKANSRSMDWLARGVFNKIRQLAPMHNITLFGCGSLYTSHQDPLVHRNPDKAMKCRWAAIPVKDIGRWVLRKLSQNLRAKNRGTGEYYHQGVKEFLSHYELQDLEEELLKWRSDRKSNIPCWVLQNRLAEKLGNKEAVVYIPVRGGRIYFATHKVATGAVSIVFDQKQVWVCNADHVAAANIALTGKGIGEQSSDEENPDGSRIKLQLTS

SEQ ID NO: 81 - protein, 1054 aa, Artificial Sequence
  Synthetic sequence
MSSAIKSYKSVLRPNERKNQLLKSTIQCLEDGSAFFFKMLQGLFGGITPEIVRFSTEQEKQQQDIALWCAVNWFRPVSQDSLTHTIASDNLVEKFEEYYGGTASDAIKQYFSASIGESYYWNDCRQQYYDLCRELGVEVSDLTHDLEILCREKCLAVATESNQNNSIISVLFGTGEKEDRSVKLRITKKILEAISNLKEIPKNVAPIQEIILNVAKATKETFRQVYAGNLGAPSTLEKFIAKDGQKEFDLKKLQTDLKKVIRGKSKERDWCCQEELRSYVEQNTIQYDLWAWGEMFNKAHTALKIKSTRNYNFAKQRLEQFKEIQSLNNLLVVKKLNDFFDSEFFSGEETYTICVHHLGGKDLSKLYKAWEDDPADPENAIVVLCDDLKNNFKKEPIRNILRYIFTIRQECSAQDILAAAKYNQQLDRYKSQKANPSVLGNQGFTWTNAVILPEKAQRNDRPNSLDLRIWLYLKLRHPDGRWKKHHIPFYDTRFFQEIYAAGNSPVDTCQFRTPRFGYHLPKLTDQTAIRVNKKHVKAAKTEARIRLAIQQGTLPVSNLKITEISATINSKGQVRIPVKFRVGRQKGTLQIGDRFCGYDQNQTASHAYSLWEVVKEGQYHKELGCFVRFISSGDIVSITENRGNQFDQLSYEGLAYPQYADWRKKASKFVSLWQITKKNKKKEIVTVEAKEKFDAICKYQPRLYKFNKEYAYLLRDIVRGKSLVELQQIRQEIFRFIEQDCGVTRLGSLSLSTLETVKAVKGIIYSYFSTALNASKNNPISDEQRKEFDPELFALLEKLELIRTRKKKQKVERIANGLIQTCLENNIKFIRGEGDLSTTNNATKKKANSRSMDWLARGVFNKIRQLAPMHNITLFGCGSLYTSHQDPLVHRNPDKAMKCRWAAIPVKDIGRWVLRKLSQNLRAKNRGTGEYYHQGVKEFLSHYELQDLEEELLKWRSDRKSNIPCWVLQNRLAEKLGNKEAVVYIPVRGGRIYFATHKVATGAVSIVFDQKQVWVCNADHVAAANIALTGKGIGEQSSDEENPDGSRIKLQLTS

SEQ ID NO: 82 - protein, 1054 aa, Artificial Sequence
  Synthetic sequence
MSSAIKSYKSVLRPNERKNQLLKSTIQCLEDGSAFFFKMLQGLFGGITPEIVRFSTEQEKQQQDIALWCAVNWFRPVSQDSLTHTIASDNLVEKFEEYYGGTASDAIKQYFSASIGESYYWNDCRQQYYDLCRELGVEVSDLTHDLEILCREKCLAVATESNQNNSIISVLFGTGEKEDRSVKLRITKKILEAISNLKEIPKNVAPIQEIILNVAKATKETFRQVYAGNLGAPSTLEKFIAKDGQKEFDLKKLQTDLKKVIRGKSKERDWCCQEELRSYVEQNTIQYDLWAWGEMFNKAHTALKIKSTRNYNFAKQRLEQFKEIQSLNNLLVVKKLNDFFDSEFFSGEETYTICVHHLGGKDLSKLYKAWEDDPADPENAIVVLCDDLKNNFKKEPIRNILRYIFTIRQECSAQDILAAAKYNQQLDRYKSQKANPSVLGNQGFTWTNAVILPEKAQRNDRPNSLDLRIWLYLKLRHPDGRWKKHHIPFYDTRFFQEIYAAGNSPVDTCQFRTPRFGYHLPKLTDQTAIRVNKKHVKAAKTEARIRLAIQQGTLPVSNLKITEISATINSKGQVRIPVKFRVGRQKGTLQIGDRFCGYDQNQTASHAYSLWEVVKEGQYHKELGCFVRFISSGDIVSITENRGNQFDQLSYEGLAYPQYADWRKKASKFVSLWQITKKNKKKEIVTVEAKEKFDAICKYQPRLYKFNKEYAYLLRDIVRGKSLVELQQIRQEIFRFIEQDCGVTRLGSLSLSTLETVKAVKGIIYSYFSTALNASKNNPISDEQRKEFDPELFALLEKLELIRTRKKKQKVERIANSLIQTCRENNIKFIRGEGDLSTTNNATKKKANSRSMDWLARGVFNKIRQLAPMHNITLFGCGSLYTSHQDPLVHRNPDKAMKCRWAAIPVKDIGRWVLRKLSQNLRAKNRGTGEYYHQGVKEFLSHYELQDLEEELLKWRSDRKSNIPCWVLQNRLAEKLGNKEAVVYIPVRGGRIYFATHKVATGAVSIVFDQKQVWVCNADHVAAANIALTGKGIGEQSSDEENPDGSRIKLQLTS

SEQ ID NO: 83 - protein, 1054 aa, Artificial Sequence
  Synthetic sequence
MSSAIKSYKSVLRPNERKNQLLKSTIQCLEDGSAFFFKMLQGLFGGITPEIVRFSTEQEKQQQDIALWCAVNWFRPVSQDSLTHTIASDNLVEKFEEYYGGTASDAIKQYFSASIGESYYWNDCRQQYYDLCRELGVEVSDLTHDLEILCREKCLAVATESNQNNSIISVLFGTGEKEDRSVKLRITKKILEAISNLKEIPKNVAPIQEIILNVAKATKETFRQVYAGNLGAPSTLEKFIAKDGQKEFDLKKLQTDLKKVIRGKSKERDWCCQEELRSYVEQNTIQYDLWAWGEMFNKAHTALKIKSTRNYNFAKQRLEQFKEIQSLNNLLVVKKLNDFFDSEFFSGEETYTICVHHLGGKDLSKLYKAWEDDPADPENAIVVLCDDLKNNFKKEPIRNILRYIFTIRQECSAQDILAAAKYNQQLDRYKSQKANPSVLGNQGFTWTNAVILPEKAQRNDRPNSLDLRIWLYLKLRHPDGRWKKHHIPFYDTRFFQEIYAAGNSPVDTCQFRTPRFGYHLPKLTDQTAIRVNKKHVKAAKTEARIRLAIQQGTLPVSNLKITEISATINSKGQVRIPVKFRVGRQKGTLQIGDRFCGYDQNQTASHAYSLWEVVKEGQYHKELGCFVRFISSGDIVSITENRGNQFDQLSYEGLAYPQYADWRKKASKFVSLWQITKKNKKKEIVTVEAKEKFDAICKYQPRLYKFNKEYAYLLRDIVRGKSLVELQQIRQEIFRFIEQDCGVTRLGSLSLSTLETVKAVKGIIYSYFSTALNASKNNPISDEQRKEFDPELFALLEKLELIRTRKKKQKVERIANSLIQTCLENRIKFIRGEGDLSTTNNATKKKANSRSMDWLARGVFNKIRQLAPMHNITLFGCGSLYTSHQDPLVHRNPDKAMKCRWAAIPVKDIGRWVLRKLSQNLRAKNRGTGEYYHQGVKEFLSHYELQDLEEELLKWRSDRKSNIPCWVLQNRLAEKLGNKEAVVYIPVRGGRIYFATHKVATGAVSIVFDQKQVWVCNADHVAAANIALTGKGIGEQSSDEENPDGSRIKLQLTS

SEQ ID NO: 84 - protein, 1054 aa, Artificial Sequence
  Synthetic sequence
MSSAIKSYKSVLRPNERKNQLLKSTIQCLEDGSAFFFKMLQGLFGGITPEIVRFSTEQEKQQQDIALWCAVNWFRPVSQDSLTHTIASDNLVEKFEEYYGGTASDAIKQYFSASIGESYYWNDCRQQYYDLCRELGVEVSDLTHDLEILCREKCLAVATESNQNNSIISVLFGTGEKEDRSVKLRITKKILEAISNLKEIPKNVAPIQEIILNVAKATKETFRQVYAGNLGAPSTLEKFIAKDGQKEFDLKKLQTDLKKVIRGKSKERDWCCQEELRSYVEQNTIQYDLWAWGEMFNKAHTALKIKSTRNYNFAKQRLEQFKEIQSLNNLLVVKKLNDFFDSEFFSGEETYTICVHHLGGKDLSKLYKAWEDDPADPENAIVVLCDDLKNNFKKEPIRNILRYIFTIRQECSAQDILAAAKYNQQLDRYKSQKANPSVLGNQGFTWTNAVILPEKAQRNDRPNSLDLRIWLYLKLRHPDGRWKKHHIPFYDTRFFQEIYAAGNSPVDTCQFRTPRFGYHLPKLTDQTAIRVNKKHVKAAKTEARIRLAIQQGTLPVSNLKITEISATINSKGQVRIPVKFRVGRQKGTLQIGDRFCGYDQNQTASHAYSLWEVVKEGQYHKELGCFVRFISSGDIVSITENRGNQFDQLSYEGLAYPQYADWRKKASKFVSLWQITKKNKKKEIVTVEAKEKFDAICKYQPRLYKFNKEYAYLLRDIVRGKSLVELQQIRQEIFRFIEQDCGVTRLGSLSLSTLETVKAVKGIIYSYFSTALNASKNNPISDEQRKEFDPELFALLEKLELIRTRKKKQKVERIANSLIQTCLENNIKFIRGERDLSTTNNATKKKANSRSMDWLARGVFNKIRQLAPMHNITLFGCGSLYTSHQDPLVHRNPDKAMKCRWAAIPVKDIGRWVLRKLSQNLRAKNRGTGEYYHQGVKEFLSHYELQDLEEELLKWRSDRKSNIPCWVLQNRLAEKLGNKEAVVYIPVRGGRIYFATHKVATGAVSIVFDQKQVWVCNADHVAAANIALTGKGIGEQSSDEENPDGSRIKLQLTS

SEQ ID NO: 85 - protein, 1054 aa, Artificial Sequence
  Synthetic sequence
MSSAIKSYKSVLRPNERKNQLLKSTIQCLEDGSAFFFKMLQGLFGGITPEIVRFSTEQEKQQQDIALWCAVNWFRPVSQDSLTHTIASDNLVEKFEEYYGGTASDAIKQYFSASIGESYYWNDCRQQYYDLCRELGVEVSDLTHDLEILCREKCLAVATESNQNNSIISVLFGTGEKEDRSVKLRITKKILEAISNLKEIPKNVAPIQEIILNVAKATKETFRQVYAGNLGAPSTLEKFIAKDGQKEFDLKKLQTDLKKVIRGKSKERDWCCQEELRSYVEQNTIQYDLWAWGEMFNKAHTALKIKSTRNYNFAKQRLEQFKEIQSLNNLLVVKKLNDFFDSEFFSGEETYTICVHHLGGKDLSKLYKAWEDDPADPENAIVVLCDDLKNNFKKEPIRNILRYIFTIRQECSAQDILAAAKYNQQLDRYKSQKANPSVLGNQGFTWTNAVILPEKAQRNDRPNSLDLRIWLYLKLRHPDGRWKKHHIPFYDTRFFQEIYAAGNSPVDTCQFRTPRFGYHLPKLTDQTAIRVNKKHVKAAKTEARIRLAIQQGTLPVSNLKITEISATINSKGQVRIPVKFRVGRQKGTLQIGDRFCGYDQNQTASHAYSLWEVVKEGQYHKELGCFVRFISSGDIVSITENRGNQFDQLSYEGLAYPQYADWRKKASKFVSLWQITKKNKKKEIVTVEAKEKFDAICKYQPRLYKFNKEYAYLLRDIVRGKSLVELQQIRQEIFRFIEQDCGVTRLGSLSLSTLETVKAVKGIIYSYFSTALNASKNNPISDEQRKEFDPELFALLEKLELIRTRKKKQKVERIANSLIQTCLENNIKFIRGEGDLGTTNNATKKKANSRSMDWLARGVFNKIRQLAPMHNITLFGCGSLYTSHQDPLVHRNPDKAMKCRWAAIPVKDIGRWVLRKLSQNLRAKNRGTGEYYHQGVKEFLSHYELQDLEEELLKWRSDRKSNIPCWVLQNRLAEKLGNKEAVVYIPVRGGRIYFATHKVATGAVSIVFDQKQVWVCNADHVAAANIALTGKGIGEQSSDEENPDGSRIKLQLTS

SEQ ID NO: 86 - protein, 1054 aa, Artificial Sequence
  Synthetic sequence
MSSAIKSYKSVLRPNERKNQLLKSTIQCLEDGSAFFFKMLQGLFGGITPEIVRFSTEQEKQQQDIALWCAVNWFRPVSQDSLTHTIASDNLVEKFEEYYGGTASDAIKQYFSASIGESYYWNDCRQQYYDLCRELGVEVSDLTHDLEILCREKCLAVATESNQNNSIISVLFGTGEKEDRSVKLRITKKILEAISNLKEIPKNVAPIQEIILNVAKATKETFRQVYAGNLGAPSTLEKFIAKDGQKEFDLKKLQTDLKKVIRGKSKERDWCCQEELRSYVEQNTIQYDLWAWGEMFNKAHTALKIKSTRNYNFAKQRLEQFKEIQSLNNLLVVKKLNDFFDSEFFSGEETYTICVHHLGGKDLSKLYKAWEDDPADPENAIVVLCDDLKNNFKKEPIRNILRYIFTIRQECSAQDILAAAKYNQQLDRYKSQKANPSVLGNQGFTWTNAVILPEKAQRNDRPNSLDLRIWLYLKLRHPDGRWKKHHIPFYDTRFFQEIYAAGNSPVDTCQFRTPRFGYHLPKLTDQTAIRVNKKHVKAAKTEARIRLAIQQGTLPVSNLKITEISATINSKGQVRIPVKFRVGRQKGTLQIGDRFCGYDQNQTASHAYSLWEVVKEGQYHKELGCFVRFISSGDIVSITENRGNQFDQLSYEGLAYPQYADWRKKASKFVSLWQITKKNKKKEIVTVEAKEKFDAICKYQPRLYKFNKEYAYLLRDIVRGKSLVELQQIRQEIFRFIEQDCGVTRLGSLSLSTLETVKAVKGIIYSYFSTALNASKNNPISDEQRKEFDPELFALLEKLELIRTRKKKQKVERIANSLIQTCLENNIKFIRGEGDLRTTNNATKKKANSRSMDWLARGVFNKIRQLAPMHNITLFGCGSLYTSHQDPLVHRNPDKAMKCRWAAIPVKDIGRWVLRKLSQNLRAKNRGTGEYYHQGVKEFLSHYELQDLEEELLKWRSDRKSNIPCWVLQNRLAEKLGNKEAVVYIPVRGGRIYFATHKVATGAVSIVFDQKQVWVCNADHVAAANIALTGKGIGEQSSDEENPDGSRIKLQLTS

SEQ ID NO: 87 - protein, 1054 aa, Artificial Sequence
  Synthetic sequence
MSSAIKSYKSVLRPNERKNQLLKSTIQCLEDGSAFFFKMLQGLFGGITPEIVRFSTEQEKQQQDIALWCAVNWFRPVSQDSLTHTIASDNLVEKFEEYYGGTASDAIKQYFSASIGESYYWNDCRQQYYDLCRELGVEVSDLTHDLEILCREKCLAVATESNQNNSIISVLFGTGEKEDRSVKLRITKKILEAISNLKEIPKNVAPIQEIILNVAKATKETFRQVYAGNLGAPSTLEKFIAKDGQKEFDLKKLQTDLKKVIRGKSKERDWCCQEELRSYVEQNTIQYDLWAWGEMFNKAHTALKIKSTRNYNFAKQRLEQFKEIQSLNNLLVVKKLNDFFDSEFFSGEETYTICVHHLGGKDLSKLYKAWEDDPADPENAIVVLCDDLKNNFKKEPIRNILRYIFTIRQECSAQDILAAAKYNQQLDRYKSQKANPSVLGNQGFTWTNAVILPEKAQRNDRPNSLDLRIWLYLKLRHPDGRWKKHHIPFYDTRFFQEIYAAGNSPVDTCQFRTPRFGYHLPKLTDQTAIRVNKKHVKAAKTEARIRLAIQQGTLPVSNLKITEISATINSKGQVRIPVKFRVGRQKGTLQIGDRFCGYDQNQTASHAYSLWEVVKEGQYHKELGCFVRFISSGDIVSITENRGNQFDQLSYEGLAYPQYADWRKKASKFVSLWQITKKNKKKEIVTVEAKEKFDAICKYQPRLYKFNKEYAYLLRDIVRGKSLVELQQIRQEIFRFIEQDCGVTRLGSLSLSTLETVKAVKGIIYSYFSTALNASKNNPISDEQRKEFDPELFALLEKLELIRTRKKKQKVERIANSLIQTCLENNIKFIRGEGDLSRTNNATKKKANSRSMDWLARGVFNKIRQLAPMHNITLFGCGSLYTSHQDPLVHRNPDKAMKCRWAAIPVKDIGRWVLRKLSQNLRAKNRGTGEYYHQGVKEFLSHYELQDLEEELLKWRSDRKSNIPCWVLQNRLAEKLGNKEAVVYIPVRGGRIYFATHKVATGAVSIVFDQKQVWVCNADHVAAANIALTGKGIGEQSSDEENPDGSRIKLQLTS

SEQ ID NO: 88 - protein, 1054 aa, Artificial Sequence
  Synthetic sequence
MSSAIKSYKSVLRPNERKNQLLKSTIQCLEDGSAFFFKMLQGLFGGITPEIVRFSTEQEKQQQDIALWCAVNWFRPVSQDSLTHTIASDNLVEKFEEYYGGTASDAIKQYFSASIGESYYWNDCRQQYYDLCRELGVEVSDLTHDLEILCREKCLAVATESNQNNSIISVLFGTGEKEDRSVKLRITKKILEAISNLKEIPKNVAPIQEIILNVAKATKETFRQVYAGNLGAPSTLEKFIAKDGQKEFDLKKLQTDLKKVIRGKSKERDWCCQEELRSYVEQNTIQYDLWAWGEMFNKAHTALKIKSTRNYNFAKQRLEQFKEIQSLNNLLVVKKLNDFFDSEFFSGEETYTICVHHLGGKDLSKLYKAWEDDPADPENAIVVLCDDLKNNFKKEPIRNILRYIFTIRQECSAQDILAAAKYNQQLDRYKSQKANPSVLGNQGFTWTNAVILPEKAQRNDRPNSLDLRIWLYLKLRHPDGRWKKHHIPFYDTRFFQEIYAAGNSPVDTCQFRTPRFGYHLPKLTDQTAIRVNKKHVKAAKTEARIRLAIQQGTLPVSNLKITEISATINSKGQVRIPVKFRVGRQKGTLQIGDRFCGYDQNQTASHAYSLWEVVKEGQYHKELGCFVRFISSGDIVSITENRGNQFDQLSYEGLAYPQYADWRKKASKFVSLWQITKKNKKKEIVTVEAKEKFDAICKYQPRLYKFNKEYAYLLRDIVRGKSLVELQQIRQEIFRFIEQDCGVTRLGSLSLSTLETVKAVKGIIYSYFSTALNASKNNPISDEQRKEFDPELFALLEKLELIRTRKKKQKVERIANSLIQTCLENNIKFIRGEGDLSTRNNATKKKANSRSMDWLARGVFNKIRQLAPMHNITLFGCGSLYTSHQDPLVHRNPDKAMKCRWAAIPVKDIGRWVLRKLSQNLRAKNRGTGEYYHQGVKEFLSHYELQDLEEELLKWRSDRKSNIPCWVLQNRLAEKLGNKEAVVYIPVRGGRIYFATHKVATGAVSIVFDQKQVWVCNADHVAAANIALTGKGIGEQSSDEENPDGSRIKLQLTS

SEQ ID NO: 89 - protein, 1054 aa, Artificial Sequence
  Synthetic sequence
MSSAIKSYKSVLRPNERKNQLLKSTIQCLEDGSAFFFKMLQGLFGGITPEIVRFSTEQEKQQQDIALWCAVNWFRPVSQDSLTHTIASDNLVEKFEEYYGGTASDAIKQYFSASIGESYYWNDCRQQYYDLCRELGVEVSDLTHDLEILCREKCLAVATESNQNNSIISVLFGTGEKEDRSVKLRITKKILEAISNLKEIPKNVAPIQEIILNVAKATKETFRQVYAGNLGAPSTLEKFIAKDGQKEFDLKKLQTDLKKVIRGKSKERDWCCQEELRSYVEQNTIQYDLWAWGEMFNKAHTALKIKSTRNYNFAKQRLEQFKEIQSLNNLLVVKKLNDFFDSEFFSGEETYTICVHHLGGKDLSKLYKAWEDDPADPENAIVVLCDDLKNNFKKEPIRNILRYIFTIRQECSAQDILAAAKYNQQLDRYKSQKANPSVLGNQGFTWTNAVILPEKAQRNDRPNSLDLRIWLYLKLRHPDGRWKKHHIPFYDTRFFQEIYAAGNSPVDTCQFRTPRFGYHLPKLTDQTAIRVNKKHVKAAKTEARIRLAIQQGTLPVSNLKITEISATINSKGQVRIPVKFRVGRQKGTLQIGDRFCGYDQNQTASHAYSLWEVVKEGQYHKELGCFVRFISSGDIVSITENRGNQFDQLSYEGLAYPQYADWRKKASKFVSLWQITKKNKKKEIVTVEAKEKFDAICKYQPRLYKFNKEYAYLLRDIVRGKSLVELQQIRQEIFRFIEQDCGVTRLGSLSLSTLETVKAVKGIIYSYFSTALNASKNNPISDEQRKEFDPELFALLEKLELIRTRKKKQKVERIANSLIQTCLENNIKFIRGEGDLSTTNNATKKKANSRSMDWLARGVFNKIRQLAPMRNITLFGCGSLYTSHQDPLVHRNPDKAMKCRWAAIPVKDIGRWVLRKLSQNLRAKNRGTGEYYHQGVKEFLSHYELQDLEEELLKWRSDRKSNIPCWVLQNRLAEKLGNKEAVVYIPVRGGRIYFATHKVATGAVSIVFDQKQVWVCNADHVAAANIALTGKGIGEQSSDEENPDGSRIKLQLTS

SEQ ID NO: 90 - protein, 1054 aa, Artificial Sequence
  Synthetic sequence
MSSAIKSYKSVLRPNERKNQLLKSTIQCLEDGSAFFFKMLQGLFGGITPEIVRFSTEQEKQQQDIALWCAVNWFRPVSQDSLTHTIASDNLVEKFEEYYGGTASDAIKQYFSASIGESYYWNDCRQQYYDLCRELGVEVSDLTHDLEILCREKCLAVATESNQNNSIISVLFGTGEKEDRSVKLRITKKILEAISNLKEIPKNVAPIQEIILNVAKATKETFRQVYAGNLGAPSTLEKFIAKDGQKEFDLKKLQTDLKKVIRGKSKERDWCCQEELRSYVEQNTIQYDLWAWGEMFNKAHTALKIKSTRNYNFAKQRLEQFKEIQSLNNLLVVKKLNDFFDSEFFSGEETYTICVHHLGGKDLSKLYKAWEDDPADPENAIVVLCDDLKNNFKKEPIRNILRYIFTIRQECSAQDILAAAKYNQQLDRYKSQKANPSVLGNQGFTWTNAVILPEKAQRNDRPNSLDLRIWLYLKLRHPDGRWKKHHIPFYDTRFFQEIYAAGNSPVDTCQFRTPRFGYHLPKLTDQTAIRVNKKHVKAAKTEARIRLAIQQGTLPVSNLKITEISATINSKGQVRIPVKFRVGRQKGTLQIGDRFCGYDQNQTASHAYSLWEVVKEGQYHKELGCFVRFISSGDIVSITENRGNQFDQLSYEGLAYPQYADWRKKASKFVSLWQITKKNKKKEIVTVEAKEKFDAICKYQPRLYKFNKEYAYLLRDIVRGKSLVELQQIRQEIFRFIEQDCGVTRLGSLSLSTLETVKAVKGIIYSYFSTALNASKNNPISDEQRKEFDPELFALLEKLELIRTRKKKQKVERIANSLIQTCLENNIKFIRGEGDLSTTNNATKKKANSRSMDWLARGVFNKIRQLAPMHNITLFRCGSLYTSHQDPLVHRNPDKAMKCRWAAIPVKDIGRWVLRKLSQNLRAKNRGTGEYYHQGVKEFLSHYELQDLEEELLKWRSDRKSNIPCWVLQNRLAEKLGNKEAVVYIPVRGGRIYFATHKVATGAVSIVFDQKQVWVCNADHVAAANIALTGKGIGEQSSDEENPDGSRIKLQLTS

SEQ ID NO: 91 - protein, 1054 aa, Artificial Sequence
  Synthetic sequence
MSSAIKSYKSVLRPNERKNQLLKSTIQCLEDGSAFFFKMLQGLFGGITPEIVRFSTEQEKQQQDIALWCAVNWFRPVSQDSLTHTIASDNLVEKFEEYYGGTASDAIKQYFSASIGESYYWNDCRQQYYDLCRELGVEVSDLTHDLEILCREKCLAVATESNQNNSIISVLFGTGEKEDRSVKLRITKKILEAISNLKEIPKNVAPIQEIILNVAKATKETFRQVYAGNLGAPSTLEKFIAKDGQKEFDLKKLQTDLKKVIRGKSKERDWCCQEELRSYVEQNTIQYDLWAWGEMFNKAHTALKIKSTRNYNFAKQRLEQFKEIQSLNNLLVVKKLNDFFDSEFFSGEETYTICVHHLGGKDLSKLYKAWEDDPADPENAIVVLCDDLKNNFKKEPIRNILRYIFTIRQECSAQDILAAAKYNQQLDRYKSQKANPSVLGNQGFTWTNAVILPEKAQRNDRPNSLDLRIWLYLKLRHPDGRWKKHHIPFYDTRFFQEIYAAGNSPVDTCQFRTPRFGYHLPKLTDQTAIRVNKKHVKAAKTEARIRLAIQQGTLPVSNLKITEISATINSKGQVRIPVKFRVGRQKGTLQIGDRFCGYDQNQTASHAYSLWEVVKEGQYHKELGCFVRFISSGDIVSITENRGNQFDQLSYEGLAYPQYADWRKKASKFVSLWQITKKNKKKEIVTVEAKEKFDAICKYQPRLYKFNKEYAYLLRDIVRGKSLVELQQIRQEIFRFIEQDCGVTRLGSLSLSTLETVKAVKGIIYSYFSTALNASKNNPISDEQRKEFDPELFALLEKLELIRTRKKKQKVERIANSLIQTCLENNIKFIRGEGDLSTTNNATKKKANSRSMDWLARGVFNKIRQLAPMHNITLFGCRSLYTSHQDPLVHRNPDKAMKCRWAAIPVKDIGRWVLRKLSQNLRAKNRGTGEYYHQGVKEFLSHYELQDLEEELLKWRSDRKSNIPCWVLQNRLAEKLGNKEAVVYIPVRGGRIYFATHKVATGAVSIVFDQKQVWVCNADHVAAANIALTGKGIGEQSSDEENPDGSRIKLQLTS

SEQ ID NO: 92 - protein, 1054 aa, Artificial Sequence
  Synthetic sequence
MSSAIKSYKSVLRPNERKNQLLKSTIQCLEDGSAFFFKMLQGLFGGITPEIVRFSTEQEKQQQDIALWCAVNWFRPVSQDSLTHTIASDNLVEKFEEYYGGTASDAIKQYFSASIGESYYWNDCRQQYYDLCRELGVEVSDLTHDLEILCREKCLAVATESNQNNSIISVLFGTGEKEDRSVKLRITKKILEAISNLKEIPKNVAPIQEIILNVAKATKETFRQVYAGNLGAPSTLEKFIAKDGQKEFDLKKLQTDLKKVIRGKSKERDWCCQEELRSYVEQNTIQYDLWAWGEMFNKAHTALKIKSTRNYNFAKQRLEQFKEIQSLNNLLVVKKLNDFFDSEFFSGEETYTICVHHLGGKDLSKLYKAWEDDPADPENAIVVLCDDLKNNFKKEPIRNILRYIFTIRQECSAQDILAAAKYNQQLDRYKSQKANPSVLGNQGFTWTNAVILPEKAQRNDRPNSLDLRIWLYLKLRHPDGRWKKHHIPFYDTRFFQEIYAAGNSPVDTCQFRTPRFGYHLPKLTDQTAIRVNKKHVKAAKTEARIRLAIQQGTLPVSNLKITEISATINSKGQVRIPVKFRVGRQKGTLQIGDRFCGYDQNQTASHAYSLWEVVKEGQYHKELGCFVRFISSGDIVSITENRGNQFDQLSYEGLAYPQYADWRKKASKFVSLWQITKKNKKKEIVTVEAKEKFDAICKYQPRLYKFNKEYAYLLRDIVRGKSLVELQQIRQEIFRFIEQDCGVTRLGSLSLSTLETVKAVKGIIYSYFSTALNASKNNPISDEQRKEFDPELFALLEKLELIRTRKKKQKVERIANSLIQTCLENNIKFIRGEGDLSTTNNATKKKANSRSMDWLARGVFNKIRQLAPMHNITLFGCGSLRTSHQDPLVHRNPDKAMKCRWAAIPVKDIGRWVLRKLSQNLRAKNRGTGEYYHQGVKEFLSHYELQDLEEELLKWRSDRKSNIPCWVLQNRLAEKLGNKEAVVYIPVRGGRIYFATHKVATGAVSIVFDQKQVWVCNADHVAAANIALTGKGIGEQSSDEENPDGSRIKLQLTS

SEQ ID NO: 93 - protein, 1054 aa, Artificial Sequence
  Synthetic sequence
MSSAIKSYKSVLRPNERKNQLLKSTIQCLEDGSAFFFKMLQGLFGGITPEIVRFSTEQEKQQQDIALWCAVNWFRPVSQDSLTHTIASDNLVEKFEEYYGGTASDAIKQYFSASIGESYYWNDCRQQYYDLCRELGVEVSDLTHDLEILCREKCLAVATESNQNNSIISVLFGTGEKEDRSVKLRITKKILEAISNLKEIPKNVAPIQEIILNVAKATKETFRQVYAGNLGAPSTLEKFIAKDGQKEFDLKKLQTDLKKVIRGKSKERDWCCQEELRSYVEQNTIQYDLWAWGEMFNKAHTALKIKSTRNYNFAKQRLEQFKEIQSLNNLLVVKKLNDFFDSEFFSGEETYTICVHHLGGKDLSKLYKAWEDDPADPENAIVVLCDDLKNNFKKEPIRNILRYIFTIRQECSAQDILAAAKYNQQLDRYKSQKANPSVLGNQGFTWTNAVILPEKAQRNDRPNSLDLRIWLYLKLRHPDGRWKKHHIPFYDTRFFQEIYAAGNSPVDTCQFRTPRFGYHLPKLTDQTAIRVNKKHVKAAKTEARIRLAIQQGTLPVSNLKITEISATINSKGQVRIPVKFRVGRQKGTLQIGDRFCGYDQNQTASHAYSLWEVVKEGQYHKELGCFVRFISSGDIVSITENRGNQFDQLSYEGLAYPQYADWRKKASKFVSLWQITKKNKKKEIVTVEAKEKFDAICKYQPRLYKFNKEYAYLLRDIVRGKSLVELQQIRQEIFRFIEQDCGVTRLGSLSLSTLETVKAVKGIIYSYFSTALNASKNNPISDEQRKEFDPELFALLEKLELIRTRKKKQKVERIANSLIQTCLENNIKFIRGEGDLSTTNNATKKKANSRSMDWLARGVFNKIRQLAPMHNITLFGCGSLYTSHQRPLVHRNPDKAMKCRWAAIPVKDIGRWVLRKLSQNLRAKNRGTGEYYHQGVKEFLSHYELQDLEEELLKWRSDRKSNIPCWVLQNRLAEKLGNKEAVVYIPVRGGRIYFATHKVATGAVSIVFDQKQVWVCNADHVAAANIALTGKGIGEQSSDEENPDGSRIKLQLTS

SEQ ID NO: 94 - protein, 1054 aa, Artificial Sequence
  Synthetic sequence
MSSAIKSYKSVLRPNERKNQLLKSTIQCLEDGSAFFFKMLQGLFGGITPEIVRFSTEQEKQQQDIALWCAVNWFRPVSQDSLTHTIASDNLVEKFEEYYGGTASDAIKQYFSASIGESYYWNDCRQQYYDLCRELGVEVSDLTHDLEILCREKCLAVATESNQNNSIISVLFGTGEKEDRSVKLRITKKILEAISNLKEIPKNVAPIQEIILNVAKATKETFRQVYAGNLGAPSTLEKFIAKDGQKEFDLKKLQTDLKKVIRGKSKERDWCCQEELRSYVEQNTIQYDLWAWGEMFNKAHTALKIKSTRNYNFAKQRLEQFKEIQSLNNLLVVKKLNDFFDSEFFSGEETYTICVHHLGGKDLSKLYKAWEDDPADPENAIVVLCDDLKNNFKKEPIRNILRYIFTIRQECSAQDILAAAKYNQQLDRYKSQKANPSVLGNQGFTWTNAVILPEKAQRNDRPNSLDLRIWLYLKLRHPDGRWKKHHIPFYDTRFFQEIYAAGNSPVDTCQFRTPRFGYHLPKLTDQTAIRVNKKHVKAAKTEARIRLAIQQGTLPVSNLKITEISATINSKGQVRIPVKFRVGRQKGTLQIGDRFCGYDQNQTASHAYSLWEVVKEGQYHKELGCFVRFISSGDIVSITENRGNQFDQLSYEGLAYPQYADWRKKASKFVSLWQITKKNKKKEIVTVEAKEKFDAICKYQPRLYKFNKEYAYLLRDIVRGKSLVELQQIRQEIFRFIEQDCGVTRLGSLSLSTLETVKAVKGIIYSYFSTALNASKNNPISDEQRKEFDPELFALLEKLELIRTRKKKQKVERIANSLIQTCLENNIKFIRGEGDLSTTNNATKKKANSRSMDWLARGVFNKIRQLAPMHNITLFGCGSLYTSHQDRLVHRNPDKAMKCRWAAIPVKDIGRWVLRKLSQNLRAKNRGTGEYYHQGVKEFLSHYELQDLEEELLKWRSDRKSNIPCWVLQNRLAEKLGNKEAVVYIPVRGGRIYFATHKVATGAVSIVFDQKQVWVCNADHVAAANIALTGKGIGEQSSDEENPDGSRIKLQLTS

SEQ ID NO: 95 - protein, 1054 aa, Artificial Sequence
  Synthetic sequence
MSSAIKSYKSVLRPNERKNQLLKSTIQCLEDGSAFFFKMLQGLFGGITPEIVRFSTEQEKQQQDIALWCAVNWFRPVSQDSLTHTIASDNLVEKFEEYYGGTASDAIKQYFSASIGESYYWNDCRQQYYDLCRELGVEVSDLTHDLEILCREKCLAVATESNQNNSIISVLFGTGEKEDRSVKLRITKKILEAISNLKEIPKNVAPIQEIILNVAKATKETFRQVYAGNLGAPSTLEKFIAKDGQKEFDLKKLQTDLKKVIRGKSKERDWCCQEELRSYVEQNTIQYDLWAWGEMFNKAHTALKIKSTRNYNFAKQRLEQFKEIQSLNNLLVVKKLNDFFDSEFFSGEETYTICVHHLGGKDLSKLYKAWEDDPADPENAIVVLCDDLKNNFKKEPIRNILRYIFTIRQECSAQDILAAAKYNQQLDRYKSQKANPSVLGNQGFTWTNAVILPEKAQRNDRPNSLDLRIWLYLKLRHPDGRWKKHHIPFYDTRFFQEIYAAGNSPVDTCQFRTPRFGYHLPKLTDQTAIRVNKKHVKAAKTEARIRLAIQQGTLPVSNLKITEISATINSKGQVRIPVKFRVGRQKGTLQIGDRFCGYDQNQTASHAYSLWEVVKEGQYHKELGCFVRFISSGDIVSITENRGNQFDQLSYEGLAYPQYADWRKKASKFVSLWQITKKNKKKEIVTVEAKEKFDAICKYQPRLYKFNKEYAYLLRDIVRGKSLVELQQIRQEIFRFIEQDCGVTRLGSLSLSTLETVKAVKGIIYSYFSTALNASKNNPISDEQRKEFDPELFALLEKLELIRTRKKKQKVERIANSLIQTCLENNIKFIRGEGDLSTTNNATKKKANSRSMDWLARGVFNKIRQLAPMHNITLFGCGSLYTSHQDPLRHRNPDKAMKCRWAAIPVKDIGRWVLRKLSQNLRAKNRGTGEYYHQGVKEFLSHYELQDLEEELLKWRSDRKSNIPCWVLQNRLAEKLGNKEAVVYIPVRGGRIYFATHKVATGAVSIVFDQKQVWVCNADHVAAANIALTGKGIGEQSSDEENPDGSRIKLQLTS

SEQ ID NO: 96 - protein, 1054 aa, Artificial Sequence
  Synthetic sequence
MSSAIKSYKSVLRPNERKNQLLKSTIQCLEDGSAFFFKMLQGLFGGITPEIVRFSTEQEKQQQDIALWCAVNWFRPVSQDSLTHTIASDNLVEKFEEYYGGTASDAIKQYFSASIGESYYWNDCRQQYYDLCRELGVEVSDLTHDLEILCREKCLAVATESNQNNSIISVLFGTGEKEDRSVKLRITKKILEAISNLKEIPKNVAPIQEIILNVAKATKETFRQVYAGNLGAPSTLEKFIAKDGQKEFDLKKLQTDLKKVIRGKSKERDWCCQEELRSYVEQNTIQYDLWAWGEMFNKAHTALKIKSTRNYNFAKQRLEQFKEIQSLNNLLVVKKLNDFFDSEFFSGEETYTICVHHLGGKDLSKLYKAWEDDPADPENAIVVLCDDLKNNFKKEPIRNILRYIFTIRQECSAQDILAAAKYNQQLDRYKSQKANPSVLGNQGFTWTNAVILPEKAQRNDRPNSLDLRIWLYLKLRHPDGRWKKHHIPFYDTRFFQEIYAAGNSPVDTCQFRTPRFGYHLPKLTDQTAIRVNKKHVKAAKTEARIRLAIQQGTLPVSNLKITEISATINSKGQVRIPVKFRVGRQKGTLQIGDRFCGYDQNQTASHAYSLWEVVKEGQYHKELGCFVRFISSGDIVSITENRGNQFDQLSYEGLAYPQYADWRKKASKFVSLWQITKKNKKKEIVTVEAKEKFDAICKYQPRLYKFNKEYAYLLRDIVRGKSLVELQQIRQEIFRFIEQDCGVTRLGSLSLSTLETVKAVKGIIYSYFSTALNASKNNPISDEQRKEFDPELFALLEKLELIRTRKKKQKVERIANSLIQTCLENNIKFIRGEGDLSTTNNATKKKANSRSMDWLARGVFNKIRQLAPMHNITLFGCGSLYTSHQDPLVHRNPRKAMKCRWAAIPVKDIGRWVLRKLSQNLRAKNRGTGEYYHQGVKEFLSHYELQDLEEELLKWRSDRKSNIPCWVLQNRLAEKLGNKEAVVYIPVRGGRIYFATHKVATGAVSIVFDQKQVWVCNADHVAAANIALTGKGIGEQSSDEENPDGSRIKLQLTS

SEQ ID NO: 97 - protein, 1054 aa, Artificial Sequence
  Synthetic sequence
MSSAIKSYKSVLRPNERKNQLLKSTIQCLEDGSAFFFKMLQGLFGGITPEIVRFSTEQEKQQQDIALWCAVNWFRPVSQDSLTHTIASDNLVEKFEEYYGGTASDAIKQYFSASIGESYYWNDCRQQYYDLCRELGVEVSDLTHDLEILCREKCLAVATESNQNNSIISVLFGTGEKEDRSVKLRITKKILEAISNLKEIPKNVAPIQEIILNVAKATKETFRQVYAGNLGAPSTLEKFIAKDGQKEFDLKKLQTDLKKVIRGKSKERDWCCQEELRSYVEQNTIQYDLWAWGEMFNKAHTALKIKSTRNYNFAKQRLEQFKEIQSLNNLLVVKKLNDFFDSEFFSGEETYTICVHHLGGKDLSKLYKAWEDDPADPENAIVVLCDDLKNNFKKEPIRNILRYIFTIRQECSAQDILAAAKYNQQLDRYKSQKANPSVLGNQGFTWTNAVILPEKAQRNDRPNSLDLRIWLYLKLRHPDGRWKKHHIPFYDTRFFQEIYAAGNSPVDTCQFRTPRFGYHLPKLTDQTAIRVNKKHVKAAKTEARIRLAIQQGTLPVSNLKITEISATINSKGQVRIPVKFRVGRQKGTLQIGDRFCGYDQNQTASHAYSLWEVVKEGQYHKELGCFVRFISSGDIVSITENRGNQFDQLSYEGLAYPQYADWRKKASKFVSLWQITKKNKKKEIVTVEAKEKFDAICKYQPRLYKFNKEYAYLLRDIVRGKSLVELQQIRQEIFRFIEQDCGVTRLGSLSLSTLETVKAVKGIIYSYFSTALNASKNNPISDEQRKEFDPELFALLEKLELIRTRKKKQKVERIANSLIQTCLENNIKFIRGEGDLSTTNNATKKKANSRSMDWLARGVFNKIRQLAPMHNITLFGCGSLYTSHQDPLVHRNPDRAMKCRWAAIPVKDIGRWVLRKLSQNLRAKNRGTGEYYHQGVKEFLSHYELQDLEEELLKWRSDRKSNIPCWVLQNRLAEKLGNKEAVVYIPVRGGRIYFATHKVATGAVSIVFDQKQVWVCNADHVAAANIALTGKGIGEQSSDEENPDGSRIKLQLTS

SEQ ID NO: 98 - protein, 1054 aa, Artificial Sequence
  Synthetic sequence
MSSAIKSYKSVLRPNERKNQLLKSTIQCLEDGSAFFFKMLQGLFGGITPEIVRFSTEQEKQQQDIALWCAVNWFRPVSQDSLTHTIASDNLVEKFEEYYGGTASDAIKQYFSASIGESYYWNDCRQQYYDLCRELGVEVSDLTHDLEILCREKCLAVATESNQNNSIISVLFGTGEKEDRSVKLRITKKILEAISNLKEIPKNVAPIQEIILNVAKATKETFRQVYAGNLGAPSTLEKFIAKDGQKEFDLKKLQTDLKKVIRGKSKERDWCCQEELRSYVEQNTIQYDLWAWGEMFNKAHTALKIKSTRNYNFAKQRLEQFKEIQSLNNLLVVKKLNDFFDSEFFSGEETYTICVHHLGGKDLSKLYKAWEDDPADPENAIVVLCDDLKNNFKKEPIRNILRYIFTIRQECSAQDILAAAKYNQQLDRYKSQKANPSVLGNQGFTWTNAVILPEKAQRNDRPNSLDLRIWLYLKLRHPDGRWKKHHIPFYDTRFFQEIYAAGNSPVDTCQFRTPRFGYHLPKLTDQTAIRVNKKHVKAAKTEARIRLAIQQGTLPVSNLKITEISATINSKGQVRIPVKFRVGRQKGTLQIGDRFCGYDQNQTASHAYSLWEVVKEGQYHKELGCFVRFISSGDIVSITENRGNQFDQLSYEGLAYPQYADWRKKASKFVSLWQITKKNKKKEIVTVEAKEKFDAICKYQPRLYKFNKEYAYLLRDIVRGKSLVELQQIRQEIFRFIEQDCGVTRLGSLSLSTLETVKAVKGIIYSYFSTALNASKNNPISDEQRKEFDPELFALLEKLELIRTRKKKQKVERIANSLIQTCLENNIKFIRGEGDLSTTNNATKKKANSRSMDWLARGVFNKIRQLAPMHNITLFGCGSLYTSHQDPLVHRNPDKAMKCRWAAIPVKDIGRWVLRKLSQNLRAKNRGTREYYHQGVKEFLSHYELQDLEEELLKWRSDRKSNIPCWVLQNRLAEKLGNKEAVVYIPVRGGRIYFATHKVATGAVSIVFDQKQVWVCNADHVAAANIALTGKGIGEQSSDEENPDGSRIKLQLTS

SEQ ID NO: 99 - protein, 1054 aa, Artificial Sequence
  Synthetic sequence
MSSAIKSYKSVLRPNERKNQLLKSTIQCLEDGSAFFFKMLQGLFGGITPEIVRFSTEQEKQQQDIALWCAVNWFRPVSQDSLTHTIASDNLVEKFEEYYGGTASDAIKQYFSASIGESYYWNDCRQQYYDLCRELGVEVSDLTHDLEILCREKCLAVATESNQNNSIISVLFGTGEKEDRSVKLRITKKILEAISNLKEIPKNVAPIQEIILNVAKATKETFRQVYAGNLGAPSTLEKFIAKDGQKEFDLKKLQTDLKKVIRGKSKERDWCCQEELRSYVEQNTIQYDLWAWGEMFNKAHTALKIKSTRNYNFAKQRLEQFKEIQSLNNLLVVKKLNDFFDSEFFSGEETYTICVHHLGGKDLSKLYKAWEDDPADPENAIVVLCDDLKNNFKKEPIRNILRYIFTIRQECSAQDILAAAKYNQQLDRYKSQKANPSVLGNQGFTWTNAVILPEKAQRNDRPNSLDLRIWLYLKLRHPDGRWKKHHIPFYDTRFFQEIYAAGNSPVDTCQFRTPRFGYHLPKLTDQTAIRVNKKHVKAAKTEARIRLAIQQGTLPVSNLKITEISATINSKGQVRIPVKFRVGRQKGTLQIGDRFCGYDQNQTASHAYSLWEVVKEGQYHKELGCFVRFISSGDIVSITENRGNQFDQLSYEGLAYPQYADWRKKASKFVSLWQITKKNKKKEIVTVEAKEKFDAICKYQPRLYKFNKEYAYLLRDIVRGKSLVELQQIRQEIFRFIEQDCGVTRLGSLSLSTLETVKAVKGIIYSYFSTALNASKNNPISDEQRKEFDPELFALLEKLELIRTRKKKQKVERIANSLIQTCLENNIKFIRGEGDLSTTNNATKKKANSRSMDWLARGVFNKIRQLAPMHNITLFGCGSLYTSHQDPLVHRNPDKAMKCRWAAIPVKDIGRWVLRKLSQNLRAKNRGTGRYYHQGVKEFLSHYELQDLEEELLKWRSDRKSNIPCWVLQNRLAEKLGNKEAVVYIPVRGGRIYFATHKVATGAVSIVFDQKQVWVCNADHVAAANIALTGKGIGEQSSDEENPDGSRIKLQLTS

SEQ ID NO: 100 - protein, 1054 aa, Artificial Sequence
  Synthetic sequence
MSSAIKSYKSVLRPNERKNQLLKSTIQCLEDGSAFFFKMLQGLFGGITPEIVRFSTEQEKQQQDIALWCAVNWFRPVSQDSLTHTIASDNLVEKFEEYYGGTASDAIKQYFSASIGESYYWNDCRQQYYDLCRELGVEVSDLTHDLEILCREKCLAVATESNQNNSIISVLFGTGEKEDRSVKLRITKKILEAISNLKEIPKNVAPIQEIILNVAKATKETFRQVYAGNLGAPSTLEKFIAKDGQKEFDLKKLQTDLKKVIRGKSKERDWCCQEELRSYVEQNTIQYDLWAWGEMFNKAHTALKIKSTRNYNFAKQRLEQFKEIQSLNNLLVVKKLNDFFDSEFFSGEETYTICVHHLGGKDLSKLYKAWEDDPADPENAIVVLCDDLKNNFKKEPIRNILRYIFTIRQECSAQDILAAAKYNQQLDRYKSQKANPSVLGNQGFTWTNAVILPEKAQRNDRPNSLDLRIWLYLKLRHPDGRWKKHHIPFYDTRFFQEIYAAGNSPVDTCQFRTPRFGYHLPKLTDQTAIRVNKKHVKAAKTEARIRLAIQQGTLPVSNLKITEISATINSKGQVRIPVKFRVGRQKGTLQIGDRFCGYDQNQTASHAYSLWEVVKEGQYHKELGCFVRFISSGDIVSITENRGNQFDQLSYEGLAYPQYADWRKKASKFVSLWQITKKNKKKEIVTVEAKEKFDAICKYQPRLYKFNKEYAYLLRDIVRGKSLVELQQIRQEIFRFIEQDCGVTRLGSLSLSTLETVKAVKGIIYSYFSTALNASKNNPISDEQRKEFDPELFALLEKLELIRTRKKKQKVERIANSLIQTCLENNIKFIRGEGDLSTTNNATKKKANSRSMDWLARGVFNKIRQLAPMHNITLFGCGSLYTSHQDPLVHRNPDKAMKCRWAAIPVKDIGRWVLRKLSQNLRAKNRGTGEYYHQGVKEFLSHYELQDREEELLKWRSDRKSNIPCWVLQNRLAEKLGNKEAVVYIPVRGGRIYFATHKVATGAVSIVFDQKQVWVCNADHVAAANIALTGKGIGEQSSDEENPDGSRIKLQLTS

SEQ ID NO: 101 - protein, 1054 aa, Artificial Sequence
  Synthetic sequence
MSSAIKSYKSVLRPNERKNQLLKSTIQCLEDGSAFFFKMLQGLFGGITPEIVRFSTEQEKQQQDIALWCAVNWFRPVSQDSLTHTIASDNLVEKFEEYYGGTASDAIKQYFSASIGESYYWNDCRQQYYDLCRELGVEVSDLTHDLEILCREKCLAVATESNQNNSIISVLFGTGEKEDRSVKLRITKKILEAISNLKEIPKNVAPIQEIILNVAKATKETFRQVYAGNLGAPSTLEKFIAKDGQKEFDLKKLQTDLKKVIRGKSKERDWCCQEELRSYVEQNTIQYDLWAWGEMFNKAHTALKIKSTRNYNFAKQRLEQFKEIQSLNNLLVVKKLNDFFDSEFFSGEETYTICVHHLGGKDLSKLYKAWEDDPADPENAIVVLCDDLKNNFKKEPIRNILRYIFTIRQECSAQDILAAAKYNQQLDRYKSQKANPSVLGNQGFTWTNAVILPEKAQRNDRPNSLDLRIWLYLKLRHPDGRWKKHHIPFYDTRFFQEIYAAGNSPVDTCQFRTPRFGYHLPKLTDQTAIRVNKKHVKAAKTEARIRLAIQQGTLPVSNLKITEISATINSKGQVRIPVKFRVGRQKGTLQIGDRFCGYDQNQTASHAYSLWEVVKEGQYHKELGCFVRFISSGDIVSITENRGNQFDQLSYEGLAYPQYADWRKKASKFVSLWQITKKNKKKEIVTVEAKEKFDAICKYQPRLYKFNKEYAYLLRDIVRGKSLVELQQIRQEIFRFIEQDCGVTRLGSLSLSTLETVKAVKGIIYSYFSTALNASKNNPISDEQRKEFDPELFALLEKLELIRTRKKKQKVERIANSLIQTCLENNIKFIRGEGDLSTTNNATKKKANSRSMDWLARGVFNKIRQLAPMHNITLFGCGSLYTSHQDPLVHRNPDKAMKCRWAAIPVKDIGRWVLRKLSQNLRAKNRGTGEYYHQGVKEFLSHYELQDLREELLKWRSDRKSNIPCWVLQNRLAEKLGNKEAVVYIPVRGGRIYFATHKVATGAVSIVFDQKQVWVCNADHVAAANIALTGKGIGEQSSDEENPDGSRIKLQLTS

SEQ ID NO: 102 - protein, 1054 aa, Artificial Sequence
  Synthetic sequence
MSSAIKSYKSVLRPNERKNQLLKSTIQCLEDGSAFFFKMLQGLFGGITPEIVRFSTEQEKQQQDIALWCAVNWFRPVSQDSLTHTIASDNLVEKFEEYYGGTASDAIKQYFSASIGESYYWNDCRQQYYDLCRELGVEVSDLTHDLEILCREKCLAVATESNQNNSIISVLFGTGEKEDRSVKLRITKKILEAISNLKEIPKNVAPIQEIILNVAKATKETFRQVYAGNLGAPSTLEKFIAKDGQKEFDLKKLQTDLKKVIRGKSKERDWCCQEELRSYVEQNTIQYDLWAWGEMFNKAHTALKIKSTRNYNFAKQRLEQFKEIQSLNNLLVVKKLNDFFDSEFFSGEETYTICVHHLGGKDLSKLYKAWEDDPADPENAIVVLCDDLKNNFKKEPIRNILRYIFTIRQECSAQDILAAAKYNQQLDRYKSQKANPSVLGNQGFTWTNAVILPEKAQRNDRPNSLDLRIWLYLKLRHPDGRWKKHHIPFYDTRFFQEIYAAGNSPVDTCQFRTPRFGYHLPKLTDQTAIRVNKKHVKAAKTEARIRLAIQQGTLPVSNLKITEISATINSKGQVRIPVKFRVGRQKGTLQIGDRFCGYDQNQTASHAYSLWEVVKEGQYHKELGCFVRFISSGDIVSITENRGNQFDQLSYEGLAYPQYADWRKKASKFVSLWQITKKNKKKEIVTVEAKEKFDAICKYQPRLYKFNKEYAYLLRDIVRGKSLVELQQIRQEIFRFIEQDCGVTRLGSLSLSTLETVKAVKGIIYSYFSTALNASKNNPISDEQRKEFDPELFALLEKLELIRTRKKKQKVERIANSLIQTCLENNIKFIRGEGDLSTTNNATKKKANSRSMDWLARGVFNKIRQLAPMHNITLFGCGSLYTSHQDPLVHRNPDKAMKCRWAAIPVKDIGRWVLRKLSQNLRAKNRGTGEYYHQGVKEFLSHYELQDLERELLKWRSDRKSNIPCWVLQNRLAEKLGNKEAVVYIPVRGGRIYFATHKVATGAVSIVFDQKQVWVCNADHVAAANIALTGKGIGEQSSDEENPDGSRIKLQLTS

SEQ ID NO: 103 - protein, 1054 aa, Artificial Sequence
  Synthetic sequence
MSSAIKSYKSVLRPNERKNQLLKSTIQCLEDGSAFFFKMLQGLFGGITPEIVRFSTEQEKQQQDIALWCAVNWFRPVSQDSLTHTIASDNLVEKFEEYYGGTASDAIKQYFSASIGESYYWNDCRQQYYDLCRELGVEVSDLTHDLEILCREKCLAVATESNQNNSIISVLFGTGEKEDRSVKLRITKKILEAISNLKEIPKNVAPIQEIILNVAKATKETFRQVYAGNLGAPSTLEKFIAKDGQKEFDLKKLQTDLKKVIRGKSKERDWCCQEELRSYVEQNTIQYDLWAWGEMFNKAHTALKIKSTRNYNFAKQRLEQFKEIQSLNNLLVVKKLNDFFDSEFFSGEETYTICVHHLGGKDLSKLYKAWEDDPADPENAIVVLCDDLKNNFKKEPIRNILRYIFTIRQECSAQDILAAAKYNQQLDRYKSQKANPSVLGNQGFTWTNAVILPEKAQRNDRPNSLDLRIWLYLKLRHPDGRWKKHHIPFYDTRFFQEIYAAGNSPVDTCQFRTPRFGYHLPKLTDQTAIRVNKKHVKAAKTEARIRLAIQQGTLPVSNLKITEISATINSKGQVRIPVKFRVGRQKGTLQIGDRFCGYDQNQTASHAYSLWEVVKEGQYHKELGCFVRFISSGDIVSITENRGNQFDQLSYEGLAYPQYADWRKKASKFVSLWQITKKNKKKEIVTVEAKEKFDAICKYQPRLYKFNKEYAYLLRDIVRGKSLVELQQIRQEIFRFIEQDCGVTRLGSLSLSTLETVKAVKGIIYSYFSTALNASKNNPISDEQRKEFDPELFALLEKLELIRTRKKKQKVERIANSLIQTCLENNIKFIRGEGDLSTTNNATKKKANSRSMDWLARGVFNKIRQLAPMHNITLFGCGSLYTSHQDPLVHRNPDKAMKCRWAAIPVKDIGRWVLRKLSQNLRAKNRGTGEYYHQGVKEFLSHYELQDLEEELLKWRSDRKSNIRCWVLQNRLAEKLGNKEAVVYIPVRGGRIYFATHKVATGAVSIVFDQKQVWVCNADHVAAANIALTGKGIGEQSSDEENPDGSRIKLQLTS

SEQ ID NO: 104 - protein, 1054 aa, Artificial Sequence
  Synthetic sequence
MSSAIKSYKSVLRPNERKNQLLKSTIQCLEDGSAFFFKMLQGLFGGITPEIVRFSTEQEKQQQDIALWCAVNWFRPVSQDSLTHTIASDNLVEKFEEYYGGTASDAIKQYFSASIGESYYWNDCRQQYYDLCRELGVEVSDLTHDLEILCREKCLAVATESNQNNSIISVLFGTGEKEDRSVKLRITKKILEAISNLKEIPKNVAPIQEIILNVAKATKETFRQVYAGNLGAPSTLEKFIAKDGQKEFDLKKLQTDLKKVIRGKSKERDWCCQEELRSYVEQNTIQYDLWAWGEMFNKAHTALKIKSTRNYNFAKQRLEQFKEIQSLNNLLVVKKLNDFFDSEFFSGEETYTICVHHLGGKDLSKLYKAWEDDPADPENAIVVLCDDLKNNFKKEPIRNILRYIFTIRQECSAQDILAAAKYNQQLDRYKSQKANPSVLGNQGFTWTNAVILPEKAQRNDRPNSLDLRIWLYLKLRHPDGRWKKHHIPFYDTRFFQEIYAAGNSPVDTCQFRTPRFGYHLPKLTDQTAIRVNKKHVKAAKTEARIRLAIQQGTLPVSNLKITEISATINSKGQVRIPVKFRVGRQKGTLQIGDRFCGYDQNQTASHAYSLWEVVKEGQYHKELGCFVRFISSGDIVSITENRGNQFDQLSYEGLAYPQYADWRKKASKFVSLWQITKKNKKKEIVTVEAKEKFDAICKYQPRLYKFNKEYAYLLRDIVRGKSLVELQQIRQEIFRFIEQDCGVTRLGSLSLSTLETVKAVKGIIYSYFSTALNASKNNPISDEQRKEFDPELFALLEKLELIRTRKKKQKVERIANSLIQTCLENNIKFIRGEGDLSTTNNATKKKANSRSMDWLARGVFNKIRQLAPMHNITLFGCGSLYTSHQDPLVHRNPDKAMKCRWAAIPVKDIGRWVLRKLSQNLRAKNRGTGEYYHQGVKEFLSHYELQDLEEELLKWRSDRKSNIPCWVLQNRLAEKLGNREAVVYIPVRGGRIYFATHKVATGAVSIVFDQKQVWVCNADHVAAANIALTGKGIGEQSSDEENPDGSRIKLQLTS

SEQ ID NO: 105 - protein, 1054 aa, Artificial Sequence
  Synthetic sequence
MSSAIKSYKSVLRPNERKNQLLKSTIQCLEDGSAFFFKMLQGLFGGITPEIVRFSTEQEKQQQDIALWCAVNWFRPVSQDSLTHTIASDNLVEKFEEYYGGTASDAIKQYFSASIGESYYWNDCRQQYYDLCRELGVEVSDLTHDLEILCREKCLAVATESNQNNSIISVLFGTGEKEDRSVKLRITKKILEAISNLKEIPKNVAPIQEIILNVAKATKETFRQVYAGNLGAPSTLEKFIAKDGQKEFDLKKLQTDLKKVIRGKSKERDWCCQEELRSYVEQNTIQYDLWAWGEMFNKAHTALKIKSTRNYNFAKQRLEQFKEIQSLNNLLVVKKLNDFFDSEFFSGEETYTICVHHLGGKDLSKLYKAWEDDPADPENAIVVLCDDLKNNFKKEPIRNILRYIFTIRQECSAQDILAAAKYNQQLDRYKSQKANPSVLGNQGFTWTNAVILPEKAQRNDRPNSLDLRIWLYLKLRHPDGRWKKHHIPFYDTRFFQEIYAAGNSPVDTCQFRTPRFGYHLPKLTDQTAIRVNKKHVKAAKTEARIRLAIQQGTLPVSNLKITEISATINSKGQVRIPVKFRVGRQKGTLQIGDRFCGYDQNQTASHAYSLWEVVKEGQYHKELGCFVRFISSGDIVSITENRGNQFDQLSYEGLAYPQYADWRKKASKFVSLWQITKKNKKKEIVTVEAKEKFDAICKYQPRLYKFNKEYAYLLRDIVRGKSLVELQQIRQEIFRFIEQDCGVTRLGSLSLSTLETVKAVKGIIYSYFSTALNASKNNPISDEQRKEFDPELFALLEKLELIRTRKKKQKVERIANSLIQTCLENNIKFIRGEGDLSTTNNATKKKANSRSMDWLARGVFNKIRQLAPMHNITLFGCGSLYTSHQDPLVHRNPDKAMKCRWAAIPVKDIGRWVLRKLSQNLRAKNRGTGEYYHQGVKEFLSHYELQDLEEELLKWRSDRKSNIPCWVLQNRLAEKLGNKEAVVYIPVRGGRIYFATHKVATGAVSIVFDQKQVWVCNRDHVAAANIALTGKGIGEQSSDEENPDGSRIKLQLTS

SEQ ID NO: 106 - protein, 1054 aa, Artificial Sequence
  Synthetic sequence
MSSAIKSYKSVLRPNERKNQLLKSTIQCLEDGSAFFFKMLQGLFGGITPEIVRFSTEQEKQQQDIALWCAVNWFRPVSQDSLTHTIASDNLVEKFEEYYGGTASDAIKQYFSASIGESYYWNDCRQQYYDLCRELGVEVSDLTHDLEILCREKCLAVATESNQNNSIISVLFGTGEKEDRSVKLRITKKILEAISNLKEIPKNVAPIQEIILNVAKATKETFRQVYAGNLGAPSTLEKFIAKDGQKEFDLKKLQTDLKKVIRGKSKERDWCCQEELRSYVEQNTIQYDLWAWGEMFNKAHTALKIKSTRNYNFAKQRLEQFKEIQSLNNLLVVKKLNDFFDSEFFSGEETYTICVHHLGGKDLSKLYKAWEDDPADPENAIVVLCDDLKNNFKKEPIRNILRYIFTIRQECSAQDILAAAKYNQQLDRYKSQKANPSVLGNQGFTWTNAVILPEKAQRNDRPNSLDLRIWLYLKLRHPDGRWKKHHIPFYDTRFFQEIYAAGNSPVDTCQFRTPRFGYHLPKLTDQTAIRVNKKHVKAAKTEARIRLAIQQGTLPVSNLKITEISATINSKGQVRIPVKFRVGRQKGTLQIGDRFCGYDQNQTASHAYSLWEVVKEGQYHKELGCFVRFISSGDIVSITENRGNQFDQLSYEGLAYPQYADWRKKASKFVSLWQITKKNKKKEIVTVEAKEKFDAICKYQPRLYKFNKEYAYLLRDIVRGKSLVELQQIRQEIFRFIEQDCGVTRLGSLSLSTLETVKAVKGIIYSYFSTALNASKNNPISDEQRKEFDPELFALLEKLELIRTRKKKQKVERIANSLIQTCLENNIKFIRGEGDLSTTNNATKKKANSRSMDWLARGVFNKIRQLAPMHNITLFGCGSLYTSHQDPLVHRNPDKAMKCRWAAIPVKDIGRWVLRKLSQNLRAKNRGTGEYYHQGVKEFLSHYELQDLEEELLKWRSDRKSNIPCWVLQNRLAEKLGNKEAVVYIPVRGGRIYFATHKVATGAVSIVFDQKQVWVCNARHVAAANIALTGKGIGEQSSDEENPDGSRIKLQLTS

SEQ ID NO: 107 - protein, 1054 aa, Artificial Sequence
  Synthetic sequence
MSSAIKSYKSVLRPNERKNQLLKSTIQCLEDGSAFFFKMLQGLFGGITPEIVRFSTEQEKQQQDIALWCAVNWFRPVSQDSLTHTIASDNLVEKFEEYYGGTASDAIKQYFSASIGESYYWNDCRQQYYDLCRELGVEVSDLTHDLEILCREKCLAVATESNQNNSIISVLFGTGEKEDRSVKLRITKKILEAISNLKEIPKNVAPIQEIILNVAKATKETFRQVYAGNLGAPSTLEKFIAKDGQKEFDLKKLQTDLKKVIRGKSKERDWCCQEELRSYVEQNTIQYDLWAWGEMFNKAHTALKIKSTRNYNFAKQRLEQFKEIQSLNNLLVVKKLNDFFDSEFFSGEETYTICVHHLGGKDLSKLYKAWEDDPADPENAIVVLCDDLKNNFKKEPIRNILRYIFTIRQECSAQDILAAAKYNQQLDRYKSQKANPSVLGNQGFTWTNAVILPEKAQRNDRPNSLDLRIWLYLKLRHPDGRWKKHHIPFYDTRFFQEIYAAGNSPVDTCQFRTPRFGYHLPKLTDQTAIRVNKKHVKAAKTEARIRLAIQQGTLPVSNLKITEISATINSKGQVRIPVKFRVGRQKGTLQIGDRFCGYDQNQTASHAYSLWEVVKEGQYHKELGCFVRFISSGDIVSITENRGNQFDQLSYEGLAYPQYADWRKKASKFVSLWQITKKNKKKEIVTVEAKEKFDAICKYQPRLYKFNKEYAYLLRDIVRGKSLVELQQIRQEIFRFIEQDCGVTRLGSLSLSTLETVKAVKGIIYSYFSTALNASKNNPISDEQRKEFDPELFALLEKLELIRTRKKKQKVERIANSLIQTCLENNIKFIRGEGDLSTTNNATKKKANSRSMDWLARGVFNKIRQLAPMHNITLFGCGSLYTSHQDPLVHRNPDKAMKCRWAAIPVKDIGRWVLRKLSQNLRAKNRGTGEYYHQGVKEFLSHYELQDLEEELLKWRSDRKSNIPCWVLQNRLAEKLGNKEAVVYIPVRGGRIYFATHKVATGAVSIVFDQKQVWVCNADHRAAANIALTGKGIGEQSSDEENPDGSRIKLQLTS

SEQ ID NO: 108 - protein, 1054 aa, Artificial Sequence
  Synthetic sequence
MSSAIKSYKSVLRPNERKNQLLKSTIQCLEDGSAFFFKMLQGLFGGITPEIVRFSTEQEKQQQDIALWCAVNWFRPVSQDSLTHTIASDNLVEKFEEYYGGTASDAIKQYFSASIGESYYWNDCRQQYYDLCRELGVEVSDLTHDLEILCREKCLAVATESNQNNSIISVLFGTGEKEDRSVKLRITKKILEAISNLKEIPKNVAPIQEIILNVAKATKETFRQVYAGNLGAPSTLEKFIAKDGQKEFDLKKLQTDLKKVIRGKSKERDWCCQEELRSYVEQNTIQYDLWAWGEMFNKAHTALKIKSTRNYNFAKQRLEQFKEIQSLNNLLVVKKLNDFFDSEFFSGEETYTICVHHLGGKDLSKLYKAWEDDPADPENAIVVLCDDLKNNFKKEPIRNILRYIFTIRQECSAQDILAAAKYNQQLDRYKSQKANPSVLGNQGFTWTNAVILPEKAQRNDRPNSLDLRIWLYLKLRHPDGRWKKHHIPFYDTRFFQEIYAAGNSPVDTCQFRTPRFGYHLPKLTDQTAIRVNKKHVKAAKTEARIRLAIQQGTLPVSNLKITEISATINSKGQVRIPVKFRVGRQKGTLQIGDRFCGYDQNQTASHAYSLWEVVKEGQYHKELGCFVRFISSGDIVSITENRGNQFDQLSYEGLAYPQYADWRKKASKFVSLWQITKKNKKKEIVTVEAKEKFDAICKYQPRLYKFNKEYAYLLRDIVRGKSLVELQQIRQEIFRFIEQDCGVTRLGSLSLSTLETVKAVKGIIYSYFSTALNASKNNPISDEQRKEFDPELFALLEKLELIRTRKKKQKVERIANSLIQTCLENNIKFIRGEGDLSTTNNATKKKANSRSMDWLARGVFNKIRQLAPMHNITLFGCGSLYTSHQDPLVHRNPDKAMKCRWAAIPVKDIGRWVLRKLSQNLRAKNRGTGEYYHQGVKEFLSHYELQDLEEELLKWRSDRKSNIPCWVLQNRLAEKLGNKEAVVYIPVRGGRIYFATHKVATGAVSIVFDQKQVWVCNADHVRAANIALTGKGIGEQSSDEENPDGSRIKLQLTS

SEQ ID NO: 109 - protein, 1054 aa, Artificial Sequence
  Synthetic sequence
MSSAIKSYKSVLRPNERKNQLLKSTIQCLEDGSAFFFKMLQGLFGGITPEIVRFSTEQEKQQQDIALWCAVNWFRPVSQDSLTHTIASDNLVEKFEEYYGGTASDAIKQYFSASIGESYYWNDCRQQYYDLCRELGVEVSDLTHDLEILCREKCLAVATESNQNNSIISVLFGTGEKEDRSVKLRITKKILEAISNLKEIPKNVAPIQEIILNVAKATKETFRQVYAGNLGAPSTLEKFIAKDGQKEFDLKKLQTDLKKVIRGKSKERDWCCQEELRSYVEQNTIQYDLWAWGEMFNKAHTALKIKSTRNYNFAKQRLEQFKEIQSLNNLLVVKKLNDFFDSEFFSGEETYTICVHHLGGKDLSKLYKAWEDDPADPENAIVVLCDDLKNNFKKEPIRNILRYIFTIRQECSAQDILAAAKYNQQLDRYKSQKANPSVLGNQGFTWTNAVILPEKAQRNDRPNSLDLRIWLYLKLRHPDGRWKKHHIPFYDTRFFQEIYAAGNSPVDTCQFRTPRFGYHLPKLTDQTAIRVNKKHVKAAKTEARIRLAIQQGTLPVSNLKITEISATINSKGQVRIPVKFRVGRQKGTLQIGDRFCGYDQNQTASHAYSLWEVVKEGQYHKELGCFVRFISSGDIVSITENRGNQFDQLSYEGLAYPQYADWRKKASKFVSLWQITKKNKKKEIVTVEAKEKFDAICKYQPRLYKFNKEYAYLLRDIVRGKSLVELQQIRQEIFRFIEQDCGVTRLGSLSLSTLETVKAVKGIIYSYFSTALNASKNNPISDEQRKEFDPELFALLEKLELIRTRKKKQKVERIANSLIQTCLENNIKFIRGEGDLSTTNNATKKKANSRSMDWLARGVFNKIRQLAPMHNITLFGCGSLYTSHQDPLVHRNPDKAMKCRWAAIPVKDIGRWVLRKLSQNLRAKNRGTGEYYHQGVKEFLSHYELQDLEEELLKWRSDRKSNIPCWVLQNRLAEKLGNKEAVVYIPVRGGRIYFATHKVATGAVSIVFDQKQVWVCNADHVAAARIALTGKGIGEQSSDEENPDGSRIKLQLTS

SEQ ID NO: 110 - protein, 1054 aa, Artificial Sequence
  Synthetic sequence
MSSAIKSYKSVLRPNERKNQLLKSTIQCLEDGSAFFFKMLQGLFGGITPEIVRFSTEQEKQQQDIALWCAVNWFRPVSQDSLTHTIASDNLVEKFEEYYGGTASDAIKQYFSASIGESYYWNDCRQQYYDLCRELGVEVSDLTHDLEILCREKCLAVATESNQNNSIISVLFGTGEKEDRSVKLRITKKILEAISNLKEIPKNVAPIQEIILNVAKATKETFRQVYAGNLGAPSTLEKFIAKDGQKEFDLKKLQTDLKKVIRGKSKERDWCCQEELRSYVEQNTIQYDLWAWGEMFNKAHTALKIKSTRNYNFAKQRLEQFKEIQSLNNLLVVKKLNDFFDSEFFSGEETYTICVHHLGGKDLSKLYKAWEDDPADPENAIVVLCDDLKNNFKKEPIRNILRYIFTIRQECSAQDILAAAKYNQQLDRYKSQKANPSVLGNQGFTWTNAVILPEKAQRNDRPNSLDLRIWLYLKLRHPDGRWKKHHIPFYDTRFFQEIYAAGNSPVDTCQFRTPRFGYHLPKLTDQTAIRVNKKHVKAAKTEARIRLAIQQGTLPVSNLKITEISATINSKGQVRIPVKFRVGRQKGTLQIGDRFCGYDQNQTASHAYSLWEVVKEGQYHKELGCFVRFISSGDIVSITENRGNQFDQLSYEGLAYPQYADWRKKASKFVSLWQITKKNKKKEIVTVEAKEKFDAICKYQPRLYKFNKEYAYLLRDIVRGKSLVELQQIRQEIFRFIEQDCGVTRLGSLSLSTLETVKAVKGIIYSYFSTALNASKNNPISDEQRKEFDPELFALLEKLELIRTRKKKQKVERIANSLIQTCLENNIKFIRGEGDLSTTNNATKKKANSRSMDWLARGVFNKIRQLAPMHNITLFGCGSLYTSHQDPLVHRNPDKAMKCRWAAIPVKDIGRWVLRKLSQNLRAKNRGTGEYYHQGVKEFLSHYELQDLEEELLKWRSDRKSNIPCWVLQNRLAEKLGNKEAVVYIPVRGGRIYFATHKVATGAVSIVFDQKQVWVCNADHVAAANIALTRKGIGEQSSDEENPDGSRIKLQLTS

SEQ ID NO: 111 - protein, 1054 aa, Artificial Sequence
  Synthetic sequence
MSSAIKSYKSVLRPNERKNQLLKSTIQCLEDGSAFFFKMLQGLFGGITPEIVRFSTEQEKQQQDIALWCAVNWFRPVSQDSLTHTIASDNLVEKFEEYYGGTASDAIKQYFSASIGESYYWNDCRQQYYDLCRELGVEVSDLTHDLEILCREKCLAVATESNQNNSIISVLFGTGEKEDRSVKLRITKKILEAISNLKEIPKNVAPIQEIILNVAKATKETFRQVYAGNLGAPSTLEKFIAKDGQKEFDLKKLQTDLKKVIRGKSKERDWCCQEELRSYVEQNTIQYDLWAWGEMFNKAHTALKIKSTRNYNFAKQRLEQFKEIQSLNNLLVVKKLNDFFDSEFFSGEETYTICVHHLGGKDLSKLYKAWEDDPADPENAIVVLCDDLKNNFKKEPIRNILRYIFTIRQECSAQDILAAAKYNQQLDRYKSQKANPSVLGNQGFTWTNAVILPEKAQRNDRPNSLDLRIWLYLKLRHPDGRWKKHHIPFYDTRFFQEIYAAGNSPVDTCQFRTPRFGYHLPKLTDQTAIRVNKKHVKAAKTEARIRLAIQQGTLPVSNLKITEISATINSKGQVRIPVKFRVGRQKGTLQIGDRFCGYDQNQTASHAYSLWEVVKEGQYHKELGCFVRFISSGDIVSITENRGNQFDQLSYEGLAYPQYADWRKKASKFVSLWQITKKNKKKEIVTVEAKEKFDAICKYQPRLYKFNKEYAYLLRDIVRGKSLVELQQIRQEIFRFIEQDCGVTRLGSLSLSTLETVKAVKGIIYSYFSTALNASKNNPISDEQRKEFDPELFALLEKLELIRTRKKKQKVERIANSLIQTCLENNIKFIRGEGDLSTTNNATKKKANSRSMDWLARGVFNKIRQLAPMHNITLFGCGSLYTSHQDPLVHRNPDKAMKCRWAAIPVKDIGRWVLRKLSQNLRAKNRGTGEYYHQGVKEFLSHYELQDLEEELLKWRSDRKSNIPCWVLQNRLAEKLGNKEAVVYIPVRGGRIYFATHKVATGAVSIVFDQKQVWVCNADHVAAANIALTGKRIGEQSSDEENPDGSRIKLQLTS

SEQ ID NO: 112 - protein, 1054 aa, Artificial Sequence
  Synthetic sequence
MSSAIKSYKSVLRPNERKNQLLKSTIQCLEDGSAFFFKMLQGLFGGITPEIVRFSTEQEKQQQDIALWCAVNWFRPVSQDSLTHTIASDNLVEKFEEYYGGTASDAIKQYFSASIGESYYWNDCRQQYYDLCRELGVEVSDLTHDLEILCREKCLAVATESNQNNSIISVLFGTGEKEDRSVKLRITKKILEAISNLKEIPKNVAPIQEIILNVAKATKETFRQVYAGNLGAPSTLEKFIAKDGQKEFDLKKLQTDLKKVIRGKSKERDWCCQEELRSYVEQNTIQYDLWAWGEMFNKAHTALKIKSTRNYNFAKQRLEQFKEIQSLNNLLVVKKLNDFFDSEFFSGEETYTICVHHLGGKDLSKLYKAWEDDPADPENAIVVLCDDLKNNFKKEPIRNILRYIFTIRQECSAQDILAAAKYNQQLDRYKSQKANPSVLGNQGFTWTNAVILPEKAQRNDRPNSLDLRIWLYLKLRHPDGRWKKHHIPFYDTRFFQEIYAAGNSPVDTCQFRTPRFGYHLPKLTDQTAIRVNKKHVKAAKTEARIRLAIQQGTLPVSNLKITEISATINSKGQVRIPVKFRVGRQKGTLQIGDRFCGYDQNQTASHAYSLWEVVKEGQYHKELGCFVRFISSGDIVSITENRGNQFDQLSYEGLAYPQYADWRKKASKFVSLWQITKKNKKKEIVTVEAKEKFDAICKYQPRLYKFNKEYAYLLRDIVRGKSLVELQQIRQEIFRFIEQDCGVTRLGSLSLSTLETVKAVKGIIYSYFSTALNASKNNPISDEQRKEFDPELFALLEKLELIRTRKKKQKVERIANSLIQTCLENNIKFIRGEGDLSTTNNATKKKANSRSMDWLARGVFNKIRQLAPMHNITLFGCGSLYTSHQDPLVHRNPDKAMKCRWAAIPVKDIGRWVLRKLSQNLRAKNRGTGEYYHQGVKEFLSHYELQDLEEELLKWRSDRKSNIPCWVLQNRLAEKLGNKEAVVYIPVRGGRIYFATHKVATGAVSIVFDQKQVWVCNADHVAAANIALTGKGIGRQSSDEENPDGSRIKLQLTS

SEQ ID NO: 113 - protein, 1054 aa, Artificial Sequence
  Synthetic sequence
MSSAIKSYKSVLRPNERKNQLLKSTIQCLEDGSAFFFKMLQGLFGGITPEIVRFSTEQEKQQQDIALWCAVNWFRPVSQDSLTHTIASDNLVEKFEEYYGGTASDAIKQYFSASIGESYYWNDCRQQYYDLCRELGVEVSDLTHDLEILCREKCLAVATESNQNNSIISVLFGTGEKEDRSVKLRITKKILEAISNLKEIPKNVAPIQEIILNVAKATKETFRQVYAGNLGAPSTLEKFIAKDGQKEFDLKKLQTDLKKVIRGKSKERDWCCQEELRSYVEQNTIQYDLWAWGEMFNKAHTALKIKSTRNYNFAKQRLEQFKEIQSLNNLLVVKKLNDFFDSEFFSGEETYTICVHHLGGKDLSKLYKAWEDDPADPENAIVVLCDDLKNNFKKEPIRNILRYIFTIRQECSAQDILAAAKYNQQLDRYKSQKANPSVLGNQGFTWTNAVILPEKAQRNDRPNSLDLRIWLYLKLRHPDGRWKKHHIPFYDTRFFQEIYAAGNSPVDTCQFRTPRFGYHLPKLTDQTAIRVNKKHVKAAKTEARIRLAIQQGTLPVSNLKITEISATINSKGQVRIPVKFRVGRQKGTLQIGDRFCGYDQNQTASHAYSLWEVVKEGQYHKELGCFVRFISSGDIVSITENRGNQFDQLSYEGLAYPQYADWRKKASKFVSLWQITKKNKKKEIVTVEAKEKFDAICKYQPRLYKFNKEYAYLLRDIVRGKSLVELQQIRQEIFRFIEQDCGVTRLGSLSLSTLETVKAVKGIIYSYFSTALNASKNNPISDEQRKEFDPELFALLEKLELIRTRKKKQKVERIANSLIQTCLENNIKFIRGEGDLSTTNNATKKKANSRSMDWLARGVFNKIRQLAPMHNITLFGCGSLYTSHQDPLVHRNPDKAMKCRWAAIPVKDIGRWVLRKLSQNLRAKNRGTGEYYHQGVKEFLSHYELQDLEEELLKWRSDRKSNIPCWVLQNRLAEKLGNKEAVVYIPVRGGRIYFATHKVATGAVSIVFDQKQVWVCNADHVAAANIALTGKGIGEQRSDEENPDGSRIKLQLTS

SEQ ID NO: 114 - protein, 1054 aa, Artificial Sequence
  Synthetic sequence
MSSAIKSYKSVLRPNERKNQLLKSTIQCLEDGSAFFFKMLQGLFGGITPEIVRFSTEQEKQQQDIALWCAVNWFRPVSQDSLTHTIASDNLVEKFEEYYGGTASDAIKQYFSASIGESYYWNDCRQQYYDLCRELGVEVSDLTHDLEILCREKCLAVATESNQNNSIISVLFGTGEKEDRSVKLRITKKILEAISNLKEIPKNVAPIQEIILNVAKATKETFRQVYAGNLGAPSTLEKFIAKDGQKEFDLKKLQTDLKKVIRGKSKERDWCCQEELRSYVEQNTIQYDLWAWGEMFNKAHTALKIKSTRNYNFAKQRLEQFKEIQSLNNLLVVKKLNDFFDSEFFSGEETYTICVHHLGGKDLSKLYKAWEDDPADPENAIVVLCDDLKNNFKKEPIRNILRYIFTIRQECSAQDILAAAKYNQQLDRYKSQKANPSVLGNQGFTWTNAVILPEKAQRNDRPNSLDLRIWLYLKLRHPDGRWKKHHIPFYDTRFFQEIYAAGNSPVDTCQFRTPRFGYHLPKLTDQTAIRVNKKHVKAAKTEARIRLAIQQGTLPVSNLKITEISATINSKGQVRIPVKFRVGRQKGTLQIGDRFCGYDQNQTASHAYSLWEVVKEGQYHKELGCFVRFISSGDIVSITENRGNQFDQLSYEGLAYPQYADWRKKASKFVSLWQITKKNKKKEIVTVEAKEKFDAICKYQPRLYKFNKEYAYLLRDIVRGKSLVELQQIRQEIFRFIEQDCGVTRLGSLSLSTLETVKAVKGIIYSYFSTALNASKNNPISDEQRKEFDPELFALLEKLELIRTRKKKQKVERIANSLIQTCLENNIKFIRGERDLSTTNNATKKKANSRSMDWLARGVFNKIRQLAPMHNITLFGCGSLYTSHQDPLVHRNPDKAMKCRWAAIPVKDIGRWVLRKLSQNLRAKRRGTGRYYHQGVKEFLSHYELQDLEEELLKWRSDRKSNIPCWVLQNRLAEKLGNKEAVVYIPVRGGRIYFATHKVATGAVSIVFDQKQVWVCNADHVAAANIALTGKGIGRQSSDEENPDGSRIKLQLTS

SEQ ID NO: 115 - protein, 1054 aa, Artificial Sequence
  Synthetic sequence
MSSAIKSYKSVLRPNERKNQLLKSTIQCLEDGSAFFFKMLQGLFGGITPEIVRFSTEQEKQQQDIALWCAVNWFRPVSQDSLTHTIASDNLVEKFEEYYGGTASDAIKQYFSASIGESYYWNDCRQQYYDLCRELGVEVSDLTHDLEILCREKCLAVATESNQNNSIISVLFGTGEKEDRSVKLRITKKILEAISNLKEIPKNVAPIQEIILNVAKATKETFRQVYAGNLGAPSTLEKFIAKDGQKEFDLKKLQTDLKKVIRGKSKERDWCCQEELRSYVEQNTIQYDLWAWGEMFNKAHTALKIKSTRNYNFAKQRLEQFKEIQSLNNLLVVKKLNDFFDSEFFSGEETYTICVHHLGGKDLSKLYKAWEDDPADPENAIVVLCDDLKNNFKKEPIRNILRYIFTIRQECSAQDILAAAKYNQQLDRYKSQKANPSVLGNQGFTWTNAVILPEKAQRNDRPNSLDLRIWLYLKLRHPDGRWKKHHIPFYDTRFFQEIYAAGNSPVDTCQFRTPRFGYHLPKLTDQTAIRVNKKHVKAAKTEARIRLAIQQGTLPVSNLKITEISATINSKGQVRIPVKFRVGRQKGTLQIGDRFCGYDQNQTASHAYSLWEVVKEGQYHKELGCFVRFISSGDIVSITENRGNQFDQLSYEGLAYPQYADWRKKASKFVSLWQITKKNKKKEIVTVEAKEKFDAICKYQPRLYKFNKEYAYLLRDIVRGKSLVELQQIRQEIFRFIEQDCGVTRLGSLSLSTLETVKAVKGIIYSYFSTALNASKNNPISDEQRKEFDPELFALLEKLELIRTRKKKQKVERIANSLIQTCLENNIKFIRGERDLSTTNNATKKKANSRSMDWLARGVFNKIRQLAPMHNITLFGCGSLYTSHQDPLVHRNPDKAMKCRWAAIPVKDIGRWVLRKLSQNLRAKRRGTGEYYHQGVKEFLSHYELQDLEEELLKWRSDRKSNIPCWVLQNRLAEKLGNKEAVVYIPVRGGRIYFATHKVATGAVSIVFDQKQVWVCNADHVAAANIALTGKGIGEQSSDEENPDGSRIKLQLTS

SEQ ID NO: 116 - protein, 1054 aa, Artificial Sequence
  Synthetic sequence
MSSAIKSYKSVLRPNERKNQLLKSTIQCLEDGSAFFFKMLQGLFGGITPEIVRFSTEQEKQQQDIALWCAVNWFRPVSQDSLTHTIASDNLVEKFEEYYGGTASDAIKQYFSASIGESYYWNDCRQQYYDLCRELGVEVSDLTHDLEILCREKCLAVATESNQNNSIISVLFGTGEKEDRSVKLRITKKILEAISNLKEIPKNVAPIQEIILNVAKATKETFRQVYAGNLGAPSTLEKFIAKDGQKEFDLKKLQTDLKKVIRGKSKERDWCCQEELRSYVEQNTIQYDLWAWGEMFNKAHTALKIKSTRNYNFAKQRLEQFKEIQSLNNLLVVKKLNDFFDSEFFSGEETYTICVHHLGGKDLSKLYKAWEDDPADPENAIVVLCDDLKNNFKKEPIRNILRYIFTIRQECSAQDILAAAKYNQQLDRYKSQKANPSVLGNQGFTWTNAVILPEKAQRNDRPNSLDLRIWLYLKLRHPDGRWKKHHIPFYDTRFFQEIYAAGNSPVDTCQFRTPRFGYHLPKLTDQTAIRVNKKHVKAAKTEARIRLAIQQGTLPVSNLKITEISATINSKGQVRIPVKFRVGRQKGTLQIGDRFCGYDQNQTASHAYSLWEVVKEGQYHKELGCFVRFISSGDIVSITENRGNQFDQLSYEGLAYPQYADWRKKASKFVSLWQITKKNKKKEIVTVEAKEKFDAICKYQPRLYKFNKEYAYLLRDIVRGKSLVELQQIRQEIFRFIEQDCGVTRLGSLSLSTLETVKAVKGIIYSYFSTALNASKNNPISDEQRKEFDPELFALLEKLELIRTRKKKQKVERIANSLIQTCLENNIKFIRGERDLSTTNNATKKKANSRSMDWLARGVFNKIRQLAPMHNITLFGCGSLYTSHQDPLVHRNPDKAMKCRWAAIPVKDIGRWVLRKLSQNLRAKNRGTGRYYHQGVKEFLSHYELQDLEEELLKWRSDRKSNIPCWVLQNRLAEKLGNKEAVVYIPVRGGRIYFATHKVATGAVSIVFDQKQVWVCNADHVAAANIALTGKGIGEQSSDEENPDGSRIKLQLTS

SEQ ID NO: 117 - protein, 1054 aa, Artificial Sequence
  Synthetic sequence
MSSAIKSYKSVLRPNERKNQLLKSTIQCLEDGSAFFFKMLQGLFGGITPEIVRFSTEQEKQQQDIALWCAVNWFRPVSQDSLTHTIASDNLVEKFEEYYGGTASDAIKQYFSASIGESYYWNDCRQQYYDLCRELGVEVSDLTHDLEILCREKCLAVATESNQNNSIISVLFGTGEKEDRSVKLRITKKILEAISNLKEIPKNVAPIQEIILNVAKATKETFRQVYAGNLGAPSTLEKFIAKDGQKEFDLKKLQTDLKKVIRGKSKERDWCCQEELRSYVEQNTIQYDLWAWGEMFNKAHTALKIKSTRNYNFAKQRLEQFKEIQSLNNLLVVKKLNDFFDSEFFSGEETYTICVHHLGGKDLSKLYKAWEDDPADPENAIVVLCDDLKNNFKKEPIRNILRYIFTIRQECSAQDILAAAKYNQQLDRYKSQKANPSVLGNQGFTWTNAVILPEKAQRNDRPNSLDLRIWLYLKLRHPDGRWKKHHIPFYDTRFFQEIYAAGNSPVDTCQFRTPRFGYHLPKLTDQTAIRVNKKHVKAAKTEARIRLAIQQGTLPVSNLKITEISATINSKGQVRIPVKFRVGRQKGTLQIGDRFCGYDQNQTASHAYSLWEVVKEGQYHKELGCFVRFISSGDIVSITENRGNQFDQLSYEGLAYPQYADWRKKASKFVSLWQITKKNKKKEIVTVEAKEKFDAICKYQPRLYKFNKEYAYLLRDIVRGKSLVELQQIRQEIFRFIEQDCGVTRLGSLSLSTLETVKAVKGIIYSYFSTALNASKNNPISDEQRKEFDPELFALLEKLELIRTRKKKQKVERIANSLIQTCLENNIKFIRGERDLSTTNNATKKKANSRSMDWLARGVFNKIRQLAPMHNITLFGCGSLYTSHQDPLVHRNPDKAMKCRWAAIPVKDIGRWVLRKLSQNLRAKNRGTGEYYHQGVKEFLSHYELQDLEEELLKWRSDRKSNIPCWVLQNRLAEKLGNKEAVVYIPVRGGRIYFATHKVATGAVSIVFDQKQVWVCNADHVAAANIALTGKGIGRQSSDEENPDGSRIKLQLTS

SEQ ID NO: 118 - protein, 1054 aa, Artificial Sequence
  Synthetic sequence
MSSAIKSYKSVLRPNERKNQLLKSTIQCLEDGSAFFFKMLQGLFGGITPEIVRFSTEQEKQQQDIALWCAVNWFRPVSQDSLTHTIASDNLVEKFEEYYGGTASDAIKQYFSASIGESYYWNDCRQQYYDLCRELGVEVSDLTHDLEILCREKCLAVATESNQNNSIISVLFGTGEKEDRSVKLRITKKILEAISNLKEIPKNVAPIQEIILNVAKATKETFRQVYAGNLGAPSTLEKFIAKDGQKEFDLKKLQTDLKKVIRGKSKERDWCCQEELRSYVEQNTIQYDLWAWGEMFNKAHTALKIKSTRNYNFAKQRLEQFKEIQSLNNLLVVKKLNDFFDSEFFSGEETYTICVHHLGGKDLSKLYKAWEDDPADPENAIVVLCDDLKNNFKKEPIRNILRYIFTIRQECSAQDILAAAKYNQQLDRYKSQKANPSVLGNQGFTWTNAVILPEKAQRNDRPNSLDLRIWLYLKLRHPDGRWKKHHIPFYDTRFFQEIYAAGNSPVDTCQFRTPRFGYHLPKLTDQTAIRVNKKHVKAAKTEARIRLAIQQGTLPVSNLKITEISATINSKGQVRIPVKFRVGRQKGTLQIGDRFCGYDQNQTASHAYSLWEVVKEGQYHKELGCFVRFISSGDIVSITENRGNQFDQLSYEGLAYPQYADWRKKASKFVSLWQITKKNKKKEIVTVEAKEKFDAICKYQPRLYKFNKEYAYLLRDIVRGKSLVELQQIRQEIFRFIEQDCGVTRLGSLSLSTLETVKAVKGIIYSYFSTALNASKNNPISDEQRKEFDPELFALLEKLELIRTRKKKQKVERIANSLIQTCLENNIKFIRGEGDLSTTNNATKKKANSRSMDWLARGVFNKIRQLAPMHNITLFGCGSLYTSHQDPLVHRNPDKAMKCRWAAIPVKDIGRWVLRKLSQNLRAKRRGTGEYYHQGVKEFLSHYELQDLEEELLKWRSDRKSNIPCWVLQNRLAEKLGNKEAVVYIPVRGGRIYFATHKVATGAVSIVFDQKQVWVCNADHVAAANIALTGKGIGRQSSDEENPDGSRIKLQLTS

SEQ ID NO: 119 - protein, 1054 aa, Artificial Sequence
  Synthetic sequence
MSSAIKSYKSVLRPNERKNQLLKSTIQCLEDGSAFFFKMLQGLFGGITPEIVRFSTEQEKQQQDIALWCAVNWFRPVSQDSLTHTIASDNLVEKFEEYYGGTASDAIKQYFSASIGESYYWNDCRQQYYDLCRELGVEVSDLTHDLEILCREKCLAVATESNQNNSIISVLFGTGEKEDRSVKLRITKKILEAISNLKEIPKNVAPIQEIILNVAKATKETFRQVYAGNLGAPSTLEKFIAKDGQKEFDLKKLQTDLKKVIRGKSKERDWCCQEELRSYVEQNTIQYDLWAWGEMFNKAHTALKIKSTRNYNFAKQRLEQFKEIQSLNNLLVVKKLNDFFDSEFFSGEETYTICVHHLGGKDLSKLYKAWEDDPADPENAIVVLCDDLKNNFKKEPIRNILRYIFTIRQECSAQDILAAAKYNQQLDRYKSQKANPSVLGNQGFTWTNAVILPEKAQRNDRPNSLDLRIWLYLKLRHPDGRWKKHHIPFYDTRFFQEIYAAGNSPVDTCQFRTPRFGYHLPKLTDQTAIRVNKKHVKAAKTEARIRLAIQQGTLPVSNLKITEISATINSKGQVRIPVKFRVGRQKGTLQIGDRFCGYDQNQTASHAYSLWEVVKEGQYHKELGCFVRFISSGDIVSITENRGNQFDQLSYEGLAYPQYADWRKKASKFVSLWQITKKNKKKEIVTVEAKEKFDAICKYQPRLYKFNKEYAYLLRDIVRGKSLVELQQIRQEIFRFIEQDCGVTRLGSLSLSTLETVKAVKGIIYSYFSTALNASKNNPISDEQRKEFDPELFALLEKLELIRTRKKKQKVERIANSLIQTCLENNIKFIRGERDLSTTNNATKKKANSRSMDWLARGVFNKIRQLAPMHNITLFGCGSLYTSHQDPLVHRNPDKAMKCRWAAIPVKDIGRWVLRKLSQNLRAKRRGTGRYYHQGVKEFLSHYELQDLEEELLKWRSDRKSNIPCWVLQNRLAEKLGNKEAVVYIPVRGGRIYFATHKVATGAVSIVFDQKQVWVCNADHVAAANIALTRKGIGRQSSDEENPDGSRIKLQLTS

SEQ ID NO: 120 - protein, 1054 aa, Artificial Sequence
  Synthetic sequence
MSSAIKSYKSVLRPNERKNQLLKSTIQCLEDGSAFFFKMLQGLFGGITPEIVRFSTEQEKQQQDIALWCAVNWFRPVSQDSLTHTIASDNLVEKFEEYYGGTASDAIKQYFSASIGESYYWNDCRQQYYDLCRELGVEVSDLTHDLEILCREKCLAVATESNQNNSIISVLFGTGEKEDRSVKLRITKKILEAISNLKEIPKNVAPIQEIILNVAKATKETFRQVYAGNLGAPSTLEKFIAKDGQKEFDLKKLQTDLKKVIRGKSKERDWCCQEELRSYVEQNTIQYDLWAWGEMFNKAHTALKIKSTRNYNFAKQRLEQFKEIQSLNNLLVVKKLNDFFDSEFFSGEETYTICVHHLGGKDLSKLYKAWEDDPADPENAIVVLCDDLKNNFKKEPIRNILRYIFTIRQECSAQDILAAAKYNQQLDRYKSQKANPSVLGNQGFTWTNAVILPEKAQRNDRPNSLDLRIWLYLKLRHPDGRWKKHHIPFYDTRFFQEIYAAGNSPVDTCQFRTPRFGYHLPKLTDQTAIRVNKKHVKAAKTEARIRLAIQQGTLPVSNLKITEISATINSKGQVRIPVKFRVGRQKGTLQIGDRFCGYDQNQTASHAYSLWEVVKEGQYHKELGCFVRFISSGDIVSITENRGNQFDQLSYEGLAYPQYADWRKKASKFVSLWQITKKNKKKEIVTVEAKEKFDAICKYQPRLYKFNKEYAYLLRDIVRGKSLVELQQIRQEIFRFIEQDCGVTRLGSLSLSTLETVKAVKGIIYSYFSTALNASKNNPISDEQRKEFDPELFALLEKLELIRTRKKKQKVERIANSLIQTCLENNIKFIRGERDLSTTNNATKKKANSRSMDWLARGVFNKIRQLAPMHNITLFGCGSLYTSHQDPLVHRNPDKAMKCRWAAIPVKDIGRWVLRKLSQNLRAKRRGTGEYYHQGVKEFLSHYELQDLEEELLKWRSDRKSNIPCWVLQNRLAEKLGNKEAVVYIPVRGGRIYFATHKVATGAVSIVFDQKQVWVCNADHVAAANIALTRKGIGEQSSDEENPDGSRIKLQLTS

SEQ ID NO: 121 - protein, 1054 aa, Artificial Sequence
  Synthetic sequence
MSSAIKSYKSVLRPNERKNQLLKSTIQCLEDGSAFFFKMLQGLFGGITPEIVRFSTEQEKQQQDIALWCAVNWFRPVSQDSLTHTIASDNLVEKFEEYYGGTASDAIKQYFSASIGESYYWNDCRQQYYDLCRELGVEVSDLTHDLEILCREKCLAVATESNQNNSIISVLFGTGEKEDRSVKLRITKKILEAISNLKEIPKNVAPIQEIILNVAKATKETFRQVYAGNLGAPSTLEKFIAKDGQKEFDLKKLQTDLKKVIRGKSKERDWCCQEELRSYVEQNTIQYDLWAWGEMFNKAHTALKIKSTRNYNFAKQRLEQFKEIQSLNNLLVVKKLNDFFDSEFFSGEETYTICVHHLGGKDLSKLYKAWEDDPADPENAIVVLCDDLKNNFKKEPIRNILRYIFTIRQECSAQDILAAAKYNQQLDRYKSQKANPSVLGNQGFTWTNAVILPEKAQRNDRPNSLDLRIWLYLKLRHPDGRWKKHHIPFYDTRFFQEIYAAGNSPVDTCQFRTPRFGYHLPKLTDQTAIRVNKKHVKAAKTEARIRLAIQQGTLPVSNLKITEISATINSKGQVRIPVKFRVGRQKGTLQIGDRFCGYDQNQTASHAYSLWEVVKEGQYHKELGCFVRFISSGDIVSITENRGNQFDQLSYEGLAYPQYADWRKKASKFVSLWQITKKNKKKEIVTVEAKEKFDAICKYQPRLYKFNKEYAYLLRDIVRGKSLVELQQIRQEIFRFIEQDCGVTRLGSLSLSTLETVKAVKGIIYSYFSTALNASKNNPISDEQRKEFDPELFALLEKLELIRTRKKKQKVERIANSLIQTCLENNIKFIRGERDLSTTNNATKKKANSRSMDWLARGVFNKIRQLAPMHNITLFGCGSLYTSHQDPLVHRNPDKAMKCRWAAIPVKDIGRWVLRKLSQNLRAKNRGTGRYYHQGVKEFLSHYELQDLEEELLKWRSDRKSNIPCWVLQNRLAEKLGNKEAVVYIPVRGGRIYFATHKVATGAVSIVFDQKQVWVCNADHVAAANIALTRKGIGEQSSDEENPDGSRIKLQLTS

SEQ ID NO: 122 - protein, 1054 aa, Artificial Sequence
  Synthetic sequence
MSSAIKSYKSVLRPNERKNQLLKSTIQCLEDGSAFFFKMLQGLFGGITPEIVRFSTEQEKQQQDIALWCAVNWFRPVSQDSLTHTIASDNLVEKFEEYYGGTASDAIKQYFSASIGESYYWNDCRQQYYDLCRELGVEVSDLTHDLEILCREKCLAVATESNQNNSIISVLFGTGEKEDRSVKLRITKKILEAISNLKEIPKNVAPIQEIILNVAKATKETFRQVYAGNLGAPSTLEKFIAKDGQKEFDLKKLQTDLKKVIRGKSKERDWCCQEELRSYVEQNTIQYDLWAWGEMFNKAHTALKIKSTRNYNFAKQRLEQFKEIQSLNNLLVVKKLNDFFDSEFFSGEETYTICVHHLGGKDLSKLYKAWEDDPADPENAIVVLCDDLKNNFKKEPIRNILRYIFTIRQECSAQDILAAAKYNQQLDRYKSQKANPSVLGNQGFTWTNAVILPEKAQRNDRPNSLDLRIWLYLKLRHPDGRWKKHHIPFYDTRFFQEIYAAGNSPVDTCQFRTPRFGYHLPKLTDQTAIRVNKKHVKAAKTEARIRLAIQQGTLPVSNLKITEISATINSKGQVRIPVKFRVGRQKGTLQIGDRFCGYDQNQTASHAYSLWEVVKEGQYHKELGCFVRFISSGDIVSITENRGNQFDQLSYEGLAYPQYADWRKKASKFVSLWQITKKNKKKEIVTVEAKEKFDAICKYQPRLYKFNKEYAYLLRDIVRGKSLVELQQIRQEIFRFIEQDCGVTRLGSLSLSTLETVKAVKGIIYSYFSTALNASKNNPISDEQRKEFDPELFALLEKLELIRTRKKKQKVERIANSLIQTCLENNIKFIRGERDLSTTNNATKKKANSRSMDWLARGVFNKIRQLAPMHNITLFGCGSLYTSHQDPLVHRNPDKAMKCRWAAIPVKDIGRWVLRKLSQNLRAKNRGTGEYYHQGVKEFLSHYELQDLEEELLKWRSDRKSNIPCWVLQNRLAEKLGNKEAVVYIPVRGGRIYFATHKVATGAVSIVFDQKQVWVCNADHVAAANIALTRKGIGRQSSDEENPDGSRIKLQLTS

SEQ ID NO: 123 - protein, 1054 aa, Artificial Sequence
  Synthetic sequence
MSSAIKSYKSVLRPNERKNQLLKSTIQCLEDGSAFFFKMLQGLFGGITPEIVRFSTEQEKQQQDIALWCAVNWFRPVSQDSLTHTIASDNLVEKFEEYYGGTASDAIKQYFSASIGESYYWNDCRQQYYDLCRELGVEVSDLTHDLEILCREKCLAVATESNQNNSIISVLFGTGEKEDRSVKLRITKKILEAISNLKEIPKNVAPIQEIILNVAKATKETFRQVYAGNLGAPSTLEKFIAKDGQKEFDLKKLQTDLKKVIRGKSKERDWCCQEELRSYVEQNTIQYDLWAWGEMFNKAHTALKIKSTRNYNFAKQRLEQFKEIQSLNNLLVVKKLNDFFDSEFFSGEETYTICVHHLGGKDLSKLYKAWEDDPADPENAIVVLCDDLKNNFKKEPIRNILRYIFTIRQECSAQDILAAAKYNQQLDRYKSQKANPSVLGNQGFTWTNAVILPEKAQRNDRPNSLDLRIWLYLKLRHPDGRWKKHHIPFYDTRFFQEIYAAGNSPVDTCQFRTPRFGYHLPKLTDQTAIRVNKKHVKAAKTEARIRLAIQQGTLPVSNLKITEISATINSKGQVRIPVKFRVGRQKGTLQIGDRFCGYDQNQTASHAYSLWEVVKEGQYHKELGCFVRFISSGDIVSITENRGNQFDQLSYEGLAYPQYADWRKKASKFVSLWQITKKNKKKEIVTVEAKEKFDAICKYQPRLYKFNKEYAYLLRDIVRGKSLVELQQIRQEIFRFIEQDCGVTRLGSLSLSTLETVKAVKGIIYSYFSTALNASKNNPISDEQRKEFDPELFALLEKLELIRTRKKKQKVERIANSLIQTCLENNIKFIRGEGDLSTTNNATKKKANSRSMDWLARGVFNKIRQLAPMHNITLFGCGSLYTSHQDPLVHRNPDKAMKCRWAAIPVKDIGRWVLRKLSQNLRAKRRGTGEYYHQGVKEFLSHYELQDLEEELLKWRSDRKSNIPCWVLQNRLAEKLGNKEAVVYIPVRGGRIYFATHKVATGAVSIVFDQKQVWVCNADHVAAANIALTRKGIGRQSSDEENPDGSRIKLQLTS

SEQ ID NO: 124 - protein, 1054 aa, Artificial Sequence
  Synthetic sequence
MSSAIKSYKSVLRPNERKNQLLKSTIQCLEDGSAFFFKMLQGLFGGITPEIVRFSTEQEKQQQDIALWCAVNWFRPVSQDSLTHTIASDNLVEKFEEYYGGTASDAIKQYFSASIGESYYWNDCRQQYYDLCRELGVEVSDLTHDLEILCREKCLAVATESNQNNSIISVLFGTGEKEDRSVKLRITKKILEAISNLKEIPKNVAPIQEIILNVAKATKETFRQVYAGNLGAPSTLEKFIAKDGQKEFDLKKLQTDLKKVIRGKSKERDWCCQEELRSYVEQNTIQYDLWAWGEMFNKAHTALKIKSTRNYNFAKQRLEQFKEIQSLNNLLVVKKLNDFFDSEFFSGEETYTICVHHLGGKDLSKLYKAWEDDPADPENAIVVLCDDLKNNFKKEPIRNILRYIFTIRQECSAQDILAAAKYNQQLDRYKSQKANPSVLGNQGFTWTNAVILPEKAQRNDRPNSLDLRIWLYLKLRHPDGRWKKHHIPFYDTRFFQEIYAAGNSPVDTCQFRTPRFGYHLPKLTDQTAIRVNKKHVKAAKTEARIRLAIQQGTLPVSNLKITEISATINSKGQVRIPVKFRVGRQKGTLQIGDRFCGYDQNQTASHAYSLWEVVKEGQYHKELRCFVRFISSGDIVSITENRGNQFDQLSYEGLAYPQYADWRKKASKFVSLWQITKKNKKKEIVTVEAKEKFDAICKYQPRLYKFNKEYAYLLRDIVRGKSLVELQQIRQEIFRFIEQDCGVTRLGSLSLSTLETVKAVKGIIYSYFSTALNASKNNPISDEQRKEFDPELFALLEKLELIRTRKKKQKVERIANSLIQTCLENNIKFIRGERDLSTTNNATKKKANSRSMDWLARGVFNKIRQLAPMHNITLFGCGSLYTSHQDPLVHRNPDKAMKCRWAAIPVKDIGRWVLRKLSQNLRAKRRGTGRYYHQGVKEFLSHYELQDLEEELLKWRSDRKSNIPCWVLQNRLAEKLGNKEAVVYIPVRGGRIYFATHKVATGAVSIVFDQKQVWVCNADHVAAANIALTGKGIGRQSSDEENPDGSRIKLQLTS

SEQ ID NO: 125 - protein, 1054 aa, Artificial Sequence
  Synthetic sequence
MSSAIKSYKSVLRPNERKNQLLKSTIQCLEDGSAFFFKMLQGLFGGITPEIVRFSTEQEKQQQDIALWCAVNWFRPVSQDSLTHTIASDNLVEKFEEYYGGTASDAIKQYFSASIGESYYWNDCRQQYYDLCRELGVEVSDLTHDLEILCREKCLAVATESNQNNSIISVLFGTGEKEDRSVKLRITKKILEAISNLKEIPKNVAPIQEIILNVAKATKETFRQVYAGNLGAPSTLEKFIAKDGQKEFDLKKLQTDLKKVIRGKSKERDWCCQEELRSYVEQNTIQYDLWAWGEMFNKAHTALKIKSTRNYNFAKQRLEQFKEIQSLNNLLVVKKLNDFFDSEFFSGEETYTICVHHLGGKDLSKLYKAWEDDPADPENAIVVLCDDLKNNFKKEPIRNILRYIFTIRQECSAQDILAAAKYNQQLDRYKSQKANPSVLGNQGFTWTNAVILPEKAQRNDRPNSLDLRIWLYLKLRHPDGRWKKHHIPFYDTRFFQEIYAAGNSPVDTCQFRTPRFGYHLPKLTDQTAIRVNKKHVKAAKTEARIRLAIQQGTLPVSNLKITEISATINSKGQVRIPVKFRVGRQKGTLQIGDRFCGYDQNQTASHAYSLWEVVKEGQYHKERRCFVRFISSGDIVSITENRGNQFDQLSYEGRAYPQYADWRKKASKFVSLWQITKKNKKKEIVTVEAKEKFDAICKYQPRLYKFNKEYAYLLRDIVRGKSLVELQQIRQEIFRFIEQDCGVTRLGSLSLSTLETVKAVKGIIYSYFSTALNASKNNPISDEQRKEFDPELFALLEKLERIRTRKKKQKVERIANSLIQTCLENNIKFIRGERDLSTTNNATKKKANSRSMDWLARGVFNKIRQLARMHNITLFRCGSLYTRHQDPLVHRNPDRAMKCRWAAIPVKDIGRWVLRKLSQNLRAKRRGTGRYYHQGVKEFLSHYELQDREEELLKWRSDRKSNIPCWVLQNRLAEKLGNREAVVYIPVRGGRIYFATHKVATGAVSIVFDQKQVWVCNADHVRAANIALTGKGIGRQSSDEENPDGSRIKLQLTS

SEQ ID NO: 126 - protein, 1054 aa, Artificial Sequence
  Synthetic sequence
MSSAIKSYKSVLRPNERKNQLLKSTIQCLEDGSAFFFKMLQGLFGGITPEIVRFSTEQEKQQQDIALWCAVNWFRPVSQDSLTHTIASDNLVEKFEEYYGGTASDAIKQYFSASIGESYYWNDCRQQYYDLCRELGVEVSDLTHDLEILCREKCLAVATESNQNNSIISVLFGTGEKEDRSVKLRITKKILEAISNLKEIPKNVAPIQEIILNVAKATKETFRQVYAGNLGAPSTLEKFIAKDGQKEFDLKKLQTDLKKVIRGKSKERDWCCQEELRSYVEQNTIQYDLWAWGEMFNKAHTALKIKSTRNYNFAKQRLEQFKEIQSLNNLLVVKKLNDFFDSEFFSGEETYTICVHHLGGKDLSKLYKAWEDDPADPENAIVVLCDDLKNNFKKEPIRNILRYIFTIRQECSAQDILAAAKYNQQLDRYKSQKANPSVLGNQGFTWTNAVILPEKAQRNDRPNSLDLRIWLYLKLRHPDGRWKKHHIPFYDTRFFQEIYAAGNSPVDTCQFRTPRFGYHLPKLTDQTAIRVNKKHVKAAKTEARIRLAIQQGTLPVSNLKITEISATINSKGQVRIPVKFRVGRQKRTLQIGDRFCGYDQNQTASHAYSLWEVVKEGQYHKERRCRVRFISSGDIVSITENRGNQFDQLSYEGRAYPQYADWRKKASKFVSLWRITRKNKKKEIVTVEAKEKFDAICKYQPRLYKFNKEYAYLLRDIVRGKSLVELQQIRQEIFRFIEQDCGVTRLGSLSLSTLETVKAVKGIIYSYFSTALNASKNNPISDEQRKEFDPELFALLEKLERIRTRKKKQKVERIANSLIQTCLENNIKFIRGERDLRRTNNATKKKANSRSMDWLARGVFNKIRQLARMHNITLFRCGSLRTRHQRPLVHRNPRRAMKCRWAAIPVKDIGRWVLRKLSQNLRAKRRGTGRYYHQGVKEFLSHYELQDRREELLKWRSDRKSNIPCWVLQNRLAEKLGNREAVVYIPVRGGRIYFATHKVATGAVSIVFDQKQVWVCNADHVRAANIALTGKGIGRQSSDEENPDGSRIKLQLTS

SEQ ID NO: 127 - protein, 1054 aa, Artificial Sequence
  Synthetic sequence
MSSAIKSYKSVLRPNERKNQLLKSTIQCLEDGSAFFFKMLQGLFGGITPEIVRFSTEQEKQQQDIALWCAVNWFRPVSQDSLTHTIASDNLVEKFEEYYGGTASDAIKQYFSASIGESYYWNDCRQQYYDLCRELGVEVSDLTHDLEILCREKCLAVATESNQNNSIISVLFGTGEKEDRSVKLRITKKILEAISNLKEIPKNVAPIQEIILNVAKATKETFRQVYAGNLGAPSTLEKFIAKDGQKEFDLKKLQTDLKKVIRGKSKERDWCCQEELRSYVEQNTIQYDLWAWGEMFNKAHTALKIKSTRNYNFAKQRLEQFKEIQSLNNLLVVKKLNDFFDSEFFSGEETYTICVHHLGGKDLSKLYKAWEDDPADPENAIVVLCDDLKNNFKKEPIRNILRYIFTIRQECSAQDILAAAKYNQQLDRYKSQKANPSVLGNQGFTWTNAVILPEKAQRNDRPNSLDLRIWLYLKLRHPDGRWKKHHIPFYDTRFFQEIYAAGNSPVDTCQFRTPRFGYHLPKLTDQTAIRVNKKHVKAAKTEARIRLAIQQGTLPVSNLKITEISATINSKGQVRIPVKFRVGRQKGTLQIGDRFCGYDQNQTASHAYSLWEVVKEGQYHKELRCFVRFISSGDIVSITENRGNQFDQLSYEGLAYPQYADWRKKASKFVSLWQITKKNKKKEIVTVEAKEKFDAICKYQPRLYKFNKEYAYLLRDIVRGKSLVELQQIRQEIFRFIEQDCGVTRLGSLSLSTLETVKAVKGIIYSYFSTALNASKNNPISDEQRKEFDPELFALLEKLELIRTRKKKQKVERIANSLIQTCLENNIKFIRGERDLSTTNNATKKKANSRSMDWLARGVFNKIRQLAPMHNITLFGCGSLYTSHQDPLVHRNPDKAMKCRWAAIPVKDIGDWVLRKLSQNLRAKRRGTGRYYHQGVKEFLSHYELQDLEEELLKWRSDRKSNIPCWVLQNRLAEKLGNKEAVVYIPVRGGRIYFATHKVATGAVSIVFDQKQVWVCNADHVAAANIALTGKGIGRQSSDEENPDGSRIKLQLTS

SEQ ID NO: 128 - protein, 1054 aa, Artificial Sequence
  Synthetic sequence
MSSAIKSYKSVLRPNERKNQLLKSTIQCLEDGSAFFFKMLQGLFGGITPEIVRFSTEQEKQQQDIALWCAVNWFRPVSQDSLTHTIASDNLVEKFEEYYGGTASDAIKQYFSASIGESYYWNDCRQQYYDLCRELGVEVSDLTHDLEILCREKCLAVATESNQNNSIISVLFGTGEKEDRSVKLRITKKILEAISNLKEIPKNVAPIQEIILNVAKATKETFRQVYAGNLGAPSTLEKFIAKDGQKEFDLKKLQTDLKKVIRGKSKERDWCCQEELRSYVEQNTIQYDLWAWGEMFNKAHTALKIKSTRNYNFAKQRLEQFKEIQSLNNLLVVKKLNDFFDSEFFSGEETYTICVHHLGGKDLSKLYKAWEDDPADPENAIVVLCDDLKNNFKKEPIRNILRYIFTIRQECSAQDILAAAKYNQQLDRYKSQKANPSVLGNQGFTWTNAVILPEKAQRNDRPNSLDLRIWLYLKLRHPDGRWKKHHIPFYDTRFFQEIYAAGNSPVDTCQFRTPRFGYHLPKLTDQTAIRVNKKHVKAAKTEARIRLAIQQGTLPVSNLKITEISATINSKGQVRIPVKFRVGRQKGTLQIGDRFCGYDQNQTASHAYSLWEVVKEGQYHKERRCFVRFISSGDIVSITENRGNQFDQLSYEGRAYPQYADWRKKASKFVSLWQITKKNKKKEIVTVEAKEKFDAICKYQPRLYKFNKEYAYLLRDIVRGKSLVELQQIRQEIFRFIEQDCGVTRLGSLSLSTLETVKAVKGIIYSYFSTALNASKNNPISDEQRKEFDPELFALLEKLERIRTRKKKQKVERIANSLIQTCLENNIKFIRGERDLSTTNNATKKKANSRSMDWLARGVFNKIRQLARMHNITLFRCGSLYTRHQDPLVHRNPDRAMKCRWAAIPVKDIGDWVLRKLSQNLRAKRRGTGRYYHQGVKEFLSHYELQDREEELLKWRSDRKSNIPCWVLQNRLAEKLGNREAVVYIPVRGGRIYFATHKVATGAVSIVFDQKQVWVCNADHVRAANIALTGKGIGRQSSDEENPDGSRIKLQLTS

SEQ ID NO: 129 - protein, 1054 aa, Artificial Sequence
  Synthetic sequence
MSSAIKSYKSVLRPNERKNQLLKSTIQCLEDGSAFFFKMLQGLFGGITPEIVRFSTEQEKQQQDIALWCAVNWFRPVSQDSLTHTIASDNLVEKFEEYYGGTASDAIKQYFSASIGESYYWNDCRQQYYDLCRELGVEVSDLTHDLEILCREKCLAVATESNQNNSIISVLFGTGEKEDRSVKLRITKKILEAISNLKEIPKNVAPIQEIILNVAKATKETFRQVYAGNLGAPSTLEKFIAKDGQKEFDLKKLQTDLKKVIRGKSKERDWCCQEELRSYVEQNTIQYDLWAWGEMFNKAHTALKIKSTRNYNFAKQRLEQFKEIQSLNNLLVVKKLNDFFDSEFFSGEETYTICVHHLGGKDLSKLYKAWEDDPADPENAIVVLCDDLKNNFKKEPIRNILRYIFTIRQECSAQDILAAAKYNQQLDRYKSQKANPSVLGNQGFTWTNAVILPEKAQRNDRPNSLDLRIWLYLKLRHPDGRWKKHHIPFYDTRFFQEIYAAGNSPVDTCQFRTPRFGYHLPKLTDQTAIRVNKKHVKAAKTEARIRLAIQQGTLPVSNLKITEISATINSKGQVRIPVKFRVGRQKRTLQIGDRFCGYDQNQTASHAYSLWEVVKEGQYHKERRCRVRFISSGDIVSITENRGNQFDQLSYEGRAYPQYADWRKKASKFVSLWRITRKNKKKEIVTVEAKEKFDAICKYQPRLYKFNKEYAYLLRDIVRGKSLVELQQIRQEIFRFIEQDCGVTRLGSLSLSTLETVKAVKGIIYSYFSTALNASKNNPISDEQRKEFDPELFALLEKLERIRTRKKKQKVERIANSLIQTCLENNIKFIRGERDLRRTNNATKKKANSRSMDWLARGVFNKIRQLARMHNITLFRCGSLRTRHQRPLVHRNPRRAMKCRWAAIPVKDIGDWVLRKLSQNLRAKRRGTGRYYHQGVKEFLSHYELQDRREELLKWRSDRKSNIPCWVLQNRLAEKLGNREAVVYIPVRGGRIYFATHKVATGAVSIVFDQKQVWVCNADHVRAANIALTGKGIGRQSSDEENPDGSRIKLQLTS

SEQ ID NO: 130 - protein, 1054 aa, Artificial Sequence
  Synthetic sequence
MSSAIKSYKSVLRPNERKNQLLKSTIQCLEDGSAFFFKMLQGLFGGITPEIVRFSTEQEKQQQDIALWCAVNWFRPVSQDSLTHTIASDNLVEKFEEYYGGTASDAIKQYFSASIGESYYWNDCRQQYYDLCRELGVEVSDLTHDLEILCREKCLAVATESNQNNSIISVLFGTGEKEDRSVKLRITKKILEAISNLKEIPKNVAPIQEIILNVAKATKETFRQVYAGNLGAPSTLEKFIAKDGQKEFDLKKLQTDLKKVIRGKSKERDWCCQEELRSYVEQNTIQYDLWAWGEMFNKAHTALKIKSTRNYNFAKQRLEQFKEIQSLNNLLVVKKLNDFFDSEFFSGEETYTICVHHLGGKDLSKLYKAWEDDPADPENAIVVLCDDLKNNFKKEPIRNILRYIFTIRQECSAQDILAAAKYNQQLDRYKSQKANPSVLGNQGFTWTNAVILPEKAQRNDRPNSLDLRIWLYLKLRHPDGRWKKHHIPFYDTRFFQEIYAAGNSPVDTCQFRTPRFGYHLPKLTDQTAIRVNKKHVKAAKTEARIRLAIQQGTLPVSNLKITEISATINSKGQVHIPVKFDVGRQKGTLQIGDRFCGYDQNQTASHAYSLWEVVKEGQYHKELGCFVRFISSGDIVSITENRGNQFDQLSYEGLAYPQYADWRKKASKFVSLWQITKKNKKKEIVTVEAKEKFDAICKYQPRLYKFNKEYAYLLRDIVRGKSLVELQQIRQEIFRFIEQDCGVTRLGSLSLSTLETVKAVKGIIYSYFSTALNASKNNPISDEQRKEFDPELFALLEKLELIRTRKKKQKVERIANSLIQTCLENNIKFIRGEGDLSTTNNATKKKANSRSMDWLARGVFNKIRQLAPMHNITLFGCGSLYTSHQDPLVHRNPDKAMKCRWAAIPVKDIGDWVLRKLSQNLRAKNIGTGEYYHQGVKEFLSHYELQDLEEELLKWRSDRKSNIPCWVLQNRLAEKLGNKEAVVYIPVRGGRIYFATHKVATGAVSIVFDQKQVWVCNADHVAAANIALTVKGIGEQSSDEENPDGSRIKLQLTS

SEQ ID NO: 131 - protein, 1054 aa, Artificial Sequence
  Synthetic sequence
MSSAIKSYKSVLRPNERKNQLLKSTIQCLEDGSAFFFKMLQGLFGGITPEIVRFSTEQEKQQQDIALWCAVNWFRPVSQDSLTHTIASDNLVEKFEEYYGGTASDAIKQYFSASIGESYYWNDCRQQYYDLCRELGVEVSDLTHDLEILCREKCLAVATESNQNNSIISVLFGTGEKEDRSVKLRITKKILEAISNLKEIPKNVAPIQEIILNVAKATKETFRQVYAGNLGAPSTLEKFIAKDGQKEFDLKKLQTDLKKVIRGKSKERDWCCQEELRSYVEQNTIQYDLWAWGEMFNKAHTALKIKSTRNYNFAKQRLEQFKEIQSLNNLLVVKKLNDFFDSEFFSGEETYTICVHHLGGKDLSKLYKAWEDDPADPENAIVVLCDDLKNNFKKEPIRNILRYIFTIRQECSAQDILAAAKYNQQLDRYKSQKANPSVLGNQGFTWTNAVILPEKAQRNDRPNSLDLRIWLYLKLRHPDGRWKKHHIPFYDTRFFQEIYAAGNSPVDTCQFRTPRFGYHLPKLTDQTAIRVNKKHVKAAKTEARIRLAIQQGTLPVSNLKITEISATINSKGQVRIPVKFDVGRQKGTLQIGDRFCGYDQNQTASHAYSLWEVVKEGQYHKELGCFVRFISSGDIVSITENRGNRFDQLSYEGLAYPQYADWRKKASKFVSLWQITKKNKKKEIVTVEAKEKFDAICKYQPRLYKFNKEYAYLLRDIVRGKSLVELQQIRQEIFRFIEQDCGVTRLGSLSLSTLETVKAVKGIIYSYFSTALNASKNNPISDEQRKEFDPELFALLEKLELIRTRKKKQKVERIANSLIQTCLENNIKFIRGEGDLSTTNNATKKKANSRSMDWLARGVFNKIRQLAPMHNITLFGCGSLYTSHQDPLVHRNPDKAMKCRWAAIPVKDIGDWVLRKLSQNLRAKNIGTGEYYHQGVKEFLSHYELQDLEEELLKWRSDRKSNIPCWVLQNRLAEKLGNKEAVVYIPVRGGRIYFATHKVATGAVSIVFDQKQVWVCNADHVAAANIALTVKGIGEQSSDEENPDGSRIKLQLTS

SEQ ID NO: 132 - protein, 1054 aa, Artificial Sequence
  Synthetic sequence
MSSAIKSYKSVLRPNERKNQLLKSTIQCLEDGSAFFFKMLQGLFGGITPEIVRFSTEQEKQQQDIALWCAVNWFRPVSQDSLTHTIASDNLVEKFEEYYGGTASDAIKQYFSASIGESYYWNDCRQQYYDLCRELGVEVSDLTHDLEILCREKCLAVATESNQNNSIISVLFGTGEKEDRSVKLRITKKILEAISNLKEIPKNVAPIQEIILNVAKATKETFRQVYAGNLGAPSTLEKFIAKDGQKEFDLKKLQTDLKKVIRGKSKERDWCCQEELRSYVEQNTIQYDLWAWGEMFNKAHTALKIKSTRNYNFAKQRLEQFKEIQSLNNLLVVKKLNDFFDSEFFSGEETYTICVHHLGGKDLSKLYKAWEDDPADPENAIVVLCDDLKNNFKKEPIRNILRYIFTIRQECSAQDILAAAKYNQQLDRYKSQKANPSVLGNQGFTWTNAVILPEKAQRNDRPNSLDLRIWLYLKLRHPDGRWKKHHIPFYDTRFFQEIYAAGNSPVDTCQFRTPRFGYHLPKLTDQTAIRVNKKHVKAAKTEARIRLAIQQGTLPVSNLKITEISATINSKGQVRIPVKFRVGRQKRTLQIGDRFCGYDQNQTASHAYSLWEVVKEGQYHKELGCFVRFISSGDIVSITENRGNQFDQLSYEGLAYPQYADWRKKASKFVSLWQITKKNKKKEIVTVEAKEKFDAICKYQPRLYKFNKEYAYLLRDIVRGKSLVELQQIRQEIFRFIEQDCGVTRLGSLSLSTLETVKAVKGIIYSYFSTALNASKNNPISDEQRKEFDPELFALLEKLELIRTRKKKQKVERIANSLIQTCLENNIKFIRGEGDLSTTNNATKKKANSRSMDWLARGVFNKIRQLAPMHNITLFGCGSLYTSHQDPLVHRNPDKAMKCRWAAIPVKDIGRWVLRKLSQNLRAKNIGTGEYYHQGVKEFLSHYELQDLEEELLKWRSDRKSNIPCWVLQNRLAEKLGNKEAVVYIPVRGGRIYFATHKVATGAVSIVFDQKQVWVCNADHVAAANIALTGKGIGEQSSDEENPDGGRIKLQLTS

SEQ ID NO: 133 - protein, 1054 aa, Artificial Sequence
  Synthetic sequence
MSSAIKSYKSVLRPNERKNQLLKSTIQCLEDGSAFFFKMLQGLFGGITPEIVRFSTEQEKQQQDIALWCAVNWFRPVSQDSLTHTIASDNLVEKFEEYYGGTASDAIKQYFSASIGESYYWNDCRQQYYDLCRELGVEVSDLTHDLEILCREKCLAVATESNQNNSIISVLFGTGEKEDRSVKLRITKKILEAISNLKEIPKNVAPIQEIILNVAKATKETFRQVYAGNLGAPSTLEKFIAKDGQKEFDLKKLQTDLKKVIRGKSKERDWCCQEELRSYVEQNTIQYDLWAWGEMFNKAHTALKIKSTRNYNFAKQRLEQFKEIQSLNNLLVVKKLNDFFDSEFFSGEETYTICVHHLGGKDLSKLYKAWEDDPADPENAIVVLCDDLKNNFKKEPIRNILRYIFTIRQECSAQDILAAAKYNQQLDRYKSQKANPSVLGNQGFTWTNAVILPEKAQRNDRPNSLDLRIWLYLKLRHPDGRWKKHHIPFYDTRFFQEIYAAGNSPVDTCQFRTPRFGYHLPKLTDQTAIRVNKKHVKAAKTEARIRLAIQQGTLPVSNLKITEISATINSKGQVRIPVKFRVGRQKGTLQIGDRFCGYDQNQTASHAYSLWEVVKEGQYHKELRCFVRFISSGDIVSITENRGNQFDQLSYEGLAYPQYADWRKKASKFVSLWQITKKNKKKEIVTVEAKEKFDAICKYQPRLYKFNKEYAYLLRDIVRGKSLVELQQIRQEIFRFIEQDCGVTRLGSLSLSTLETVKAVKGIIYSYFSTALNASKNNPISDEQRKEFDPELFALLEKLELIRTRKKKQKVERIANSLIQTCLENNIKFIRGEGDLSTTNNATKKKANSRSMDWLARGVFNKIRQLAPMHNITLFGCGSLYTSHQDPLVHRNPDKAMKCRWAAIPVKDIGRWVLRKLSQNLRAKNIGTGEYYHQGVKEFLSHYELQDLEEELLKWRSDRKSNIPCWVLQNRLAEKLGNKEAVVYIPVRGGRIYFATHKVATGAVSIVFDQKQVWVCNADHVAAANIALTGKGIGEQSSDEENPDGGRIKLQLTS

SEQ ID NO: 134 - protein, 1054 aa, Artificial Sequence
  Synthetic sequence
MSSAIKSYKSVLRPNERKNQLLKSTIQCLEDGSAFFFKMLQGLFGGITPEIVRFSTEQEKQQQDIALWCAVNWFRPVSQDSLTHTIASDNLVEKFEEYYGGTASDAIKQYFSASIGESYYWNDCRQQYYDLCRELGVEVSDLTHDLEILCREKCLAVATESNQNNSIISVLFGTGEKEDRSVKLRITKKILEAISNLKEIPKNVAPIQEIILNVAKATKETFRQVYAGNLGAPSTLEKFIAKDGQKEFDLKKLQTDLKKVIRGKSKERDWCCQEELRSYVEQNTIQYDLWAWGEMFNKAHTALKIKSTRNYNFAKQRLEQFKEIQSLNNLLVVKKLNDFFDSEFFSGEETYTICVHHLGGKDLSKLYKAWEDDPADPENAIVVLCDDLKNNFKKEPIRNILRYIFTIRQECSAQDILAAAKYNQQLDRYKSQKANPSVLGNQGFTWTNAVILPEKAQRNDRPNSLDLRIWLYLKLRHPDGRWKKHHIPFYDTRFFQEIYAAGNSPVDTCQFRTPRFGYHLPKLTDQTAIRVNKKHVKAAKTEARIRLAIQQGTLPVSNLKITEISATINSKGQVRIPVKFRVGRQKGTLQIGDRFCGYDQNQTASHAYSLWEVVKEGQYHKELGCRVRFISSGDIVSITENRGNQFDQLSYEGLAYPQYADWRKKASKFVSLWQITKKNKKKEIVTVEAKEKFDAICKYQPRLYKFNKEYAYLLRDIVRGKSLVELQQIRQEIFRFIEQDCGVTRLGSLSLSTLETVKAVKGIIYSYFSTALNASKNNPISDEQRKEFDPELFALLEKLELIRTRKKKQKVERIANSLIQTCLENNIKFIRGEGDLSTTNNATKKKANSRSMDWLARGVFNKIRQLAPMHNITLFGCGSLYTSHQDPLVHRNPDKAMKCRWAAIPVKDIGRWVLRKLSQNLRAKNIGTGEYYHQGVKEFLSHYELQDLEEELLKWRSDRKSNIPCWVLQNRLAEKLGNKEAVVYIPVRGGRIYFATHKVATGAVSIVFDQKQVWVCNADHVAAANIALTGKGIGEQSSDEENPDGGRIKLQLTS

SEQ ID NO: 135 - protein, 1054 aa, Artificial Sequence
  Synthetic sequence
MSSAIKSYKSVLRPNERKNQLLKSTIQCLEDGSAFFFKMLQGLFGGITPEIVRFSTEQEKQQQDIALWCAVNWFRPVSQDSLTHTIASDNLVEKFEEYYGGTASDAIKQYFSASIGESYYWNDCRQQYYDLCRELGVEVSDLTHDLEILCREKCLAVATESNQNNSIISVLFGTGEKEDRSVKLRITKKILEAISNLKEIPKNVAPIQEIILNVAKATKETFRQVYAGNLGAPSTLEKFIAKDGQKEFDLKKLQTDLKKVIRGKSKERDWCCQEELRSYVEQNTIQYDLWAWGEMFNKAHTALKIKSTRNYNFAKQRLEQFKEIQSLNNLLVVKKLNDFFDSEFFSGEETYTICVHHLGGKDLSKLYKAWEDDPADPENAIVVLCDDLKNNFKKEPIRNILRYIFTIRQECSAQDILAAAKYNQQLDRYKSQKANPSVLGNQGFTWTNAVILPEKAQRNDRPNSLDLRIWLYLKLRHPDGRWKKHHIPFYDTRFFQEIYAAGNSPVDTCQFRTPRFGYHLPKLTDQTAIRVNKKHVKAAKTEARIRLAIQQGTLPVSNLKITEISATINSKGQVRIPVKFRVGRQKGTLQIGDRFCGYDQNQTASHAYSLWEVVKEGQYHKELGCFVRFISSGDIVSITENRGNQFDQLSYEGLAYPQYADWRKKASKFVSLWQITKKNKKKEIVTVEAKEKFDAICKYQPRLYKFNKEYAYLLRDIVRGKSLVELQQIRQEIFRFIEQDCGVTRLGSLSLSTLETVKAVKGIIYSYFSTALNASKNNPISDEQRKEFDPELFALLEKLELIRTRKKKQKVERIANSLIQTCLENNIKFIRGEGDLSTTNNATKKKANSRSMDWLARGVFNKIRQLAPMHNITLFGCGSLYTSHQDPLVHRNPDKAMKCRWAAIPVKDIGRWVLRKLSQNLRAKNIGTGEYYHQGVKEFLSHYELQDLEEELLKWRSDRKSNIPCWVLQNRLAEKLGNKEAVVYIPVRGGRIYFATHKVATGAVSIVFDQKQVWVCNADHVAAANIALTGKGIGRQSSDEENPDGGRIKLQLTS

SEQ ID NO: 136 - protein, 1054 aa, Artificial Sequence
  Synthetic sequence
MSSAIKSYKSVLRPNERKNQLLKSTIQCLEDGSAFFFKMLQGLFGGITPEIVRFSTEQEKQQQDIALWCAVNWFRPVSQDSLTHTIASDNLVEKFEEYYGGTASDAIKQYFSASIGESYYWNDCRQQYYDLCRELGVEVSDLTHDLEILCREKCLAVATESNQNNSIISVLFGTGEKEDRSVKLRITKKILEAISNLKEIPKNVAPIQEIILNVAKATKETFRQVYAGNLGAPSTLEKFIAKDGQKEFDLKKLQTDLKKVIRGKSKERDWCCQEELRSYVEQNTIQYDLWAWGEMFNKAHTALKIKSTRNYNFAKQRLEQFKEIQSLNNLLVVKKLNDFFDSEFFSGEETYTICVHHLGGKDLSKLYKAWEDDPADPENAIVVLCDDLKNNFKKEPIRNILRYIFTIRQECSAQDILAAAKYNQQLDRYKSQKANPSVLGNQGFTWTNAVILPEKAQRNDRPNSLDLRIWLYLKLRHPDGRWKKHHIPFYDTRFFQEIYAAGNSPVDTCQFRTPRFGYHLPKLTDQTAIRVNKKHVKAAKTEARIRLAIQQGTLPVSNLKITEISATINSKGQVRIPVKFRVGRQKRTLQIGDRFCGYDQNQTASHAYSLWEVVKEGQYHKELRCFVRFISSGDIVSITENRGNQFDQLSYEGLAYPQYADWRKKASKFVSLWQITKKNKKKEIVTVEAKEKFDAICKYQPRLYKFNKEYAYLLRDIVRGKSLVELQQIRQEIFRFIEQDCGVTRLGSLSLSTLETVKAVKGIIYSYFSTALNASKNNPISDEQRKEFDPELFALLEKLELIRTRKKKQKVERIANSLIQTCLENNIKFIRGEGDLSTTNNATKKKANSRSMDWLARGVFNKIRQLAPMHNITLFGCGSLYTSHQDPLVHRNPDKAMKCRWAAIPVKDIGRWVLRKLSQNLRAKNIGTGEYYHQGVKEFLSHYELQDLEEELLKWRSDRKSNIPCWVLQNRLAEKLGNKEAVVYIPVRGGRIYFATHKVATGAVSIVFDQKQVWVCNADHVAAANIALTGKGIGEQSSDEENPDGGRIKLQLTS

SEQ ID NO: 137 - protein, 1054 aa, Artificial Sequence
  Synthetic sequence
MSSAIKSYKSVLRPNERKNQLLKSTIQCLEDGSAFFFKMLQGLFGGITPEIVRFSTEQEKQQQDIALWCAVNWFRPVSQDSLTHTIASDNLVEKFEEYYGGTASDAIKQYFSASIGESYYWNDCRQQYYDLCRELGVEVSDLTHDLEILCREKCLAVATESNQNNSIISVLFGTGEKEDRSVKLRITKKILEAISNLKEIPKNVAPIQEIILNVAKATKETFRQVYAGNLGAPSTLEKFIAKDGQKEFDLKKLQTDLKKVIRGKSKERDWCCQEELRSYVEQNTIQYDLWAWGEMFNKAHTALKIKSTRNYNFAKQRLEQFKEIQSLNNLLVVKKLNDFFDSEFFSGEETYTICVHHLGGKDLSKLYKAWEDDPADPENAIVVLCDDLKNNFKKEPIRNILRYIFTIRQECSAQDILAAAKYNQQLDRYKSQKANPSVLGNQGFTWTNAVILPEKAQRNDRPNSLDLRIWLYLKLRHPDGRWKKHHIPFYDTRFFQEIYAAGNSPVDTCQFRTPRFGYHLPKLTDQTAIRVNKKHVKAAKTEARIRLAIQQGTLPVSNLKITEISATINSKGQVRIPVKFRVGRQKRTLQIGDRFCGYDQNQTASHAYSLWEVVKEGQYHKELGCRVRFISSGDIVSITENRGNQFDQLSYEGLAYPQYADWRKKASKFVSLWQITKKNKKKEIVTVEAKEKFDAICKYQPRLYKFNKEYAYLLRDIVRGKSLVELQQIRQEIFRFIEQDCGVTRLGSLSLSTLETVKAVKGIIYSYFSTALNASKNNPISDEQRKEFDPELFALLEKLELIRTRKKKQKVERIANSLIQTCLENNIKFIRGEGDLSTTNNATKKKANSRSMDWLARGVFNKIRQLAPMHNITLFGCGSLYTSHQDPLVHRNPDKAMKCRWAAIPVKDIGRWVLRKLSQNLRAKNIGTGEYYHQGVKEFLSHYELQDLEEELLKWRSDRKSNIPCWVLQNRLAEKLGNKEAVVYIPVRGGRIYFATHKVATGAVSIVFDQKQVWVCNADHVAAANIALTGKGIGEQSSDEENPDGGRIKLQLTS

SEQ ID NO: 138 - protein, 1054 aa, Artificial Sequence
  Synthetic sequence
MSSAIKSYKSVLRPNERKNQLLKSTIQCLEDGSAFFFKMLQGLFGGITPEIVRFSTEQEKQQQDIALWCAVNWFRPVSQDSLTHTIASDNLVEKFEEYYGGTASDAIKQYFSASIGESYYWNDCRQQYYDLCRELGVEVSDLTHDLEILCREKCLAVATESNQNNSIISVLFGTGEKEDRSVKLRITKKILEAISNLKEIPKNVAPIQEIILNVAKATKETFRQVYAGNLGAPSTLEKFIAKDGQKEFDLKKLQTDLKKVIRGKSKERDWCCQEELRSYVEQNTIQYDLWAWGEMFNKAHTALKIKSTRNYNFAKQRLEQFKEIQSLNNLLVVKKLNDFFDSEFFSGEETYTICVHHLGGKDLSKLYKAWEDDPADPENAIVVLCDDLKNNFKKEPIRNILRYIFTIRQECSAQDILAAAKYNQQLDRYKSQKANPSVLGNQGFTWTNAVILPEKAQRNDRPNSLDLRIWLYLKLRHPDGRWKKHHIPFYDTRFFQEIYAAGNSPVDTCQFRTPRFGYHLPKLTDQTAIRVNKKHVKAAKTEARIRLAIQQGTLPVSNLKITEISATINSKGQVRIPVKFRVGRQKRTLQIGDRFCGYDQNQTASHAYSLWEVVKEGQYHKELGCFVRFISSGDIVSITENRGNQFDQLSYEGLAYPQYADWRKKASKFVSLWQITKKNKKKEIVTVEAKEKFDAICKYQPRLYKFNKEYAYLLRDIVRGKSLVELQQIRQEIFRFIEQDCGVTRLGSLSLSTLETVKAVKGIIYSYFSTALNASKNNPISDEQRKEFDPELFALLEKLELIRTRKKKQKVERIANSLIQTCLENNIKFIRGEGDLSTTNNATKKKANSRSMDWLARGVFNKIRQLAPMHNITLFGCGSLYTSHQDPLVHRNPDKAMKCRWAAIPVKDIGRWVLRKLSQNLRAKNIGTGEYYHQGVKEFLSHYELQDLEEELLKWRSDRKSNIPCWVLQNRLAEKLGNKEAVVYIPVRGGRIYFATHKVATGAVSIVFDQKQVWVCNADHVAAANIALTGKGIGRQSSDEENPDGGRIKLQLTS

SEQ ID NO: 139 - protein, 1054 aa, Artificial Sequence
  Synthetic sequence
MSSAIKSYKSVLRPNERKNQLLKSTIQCLEDGSAFFFKMLQGLFGGITPEIVRFSTEQEKQQQDIALWCAVNWFRPVSQDSLTHTIASDNLVEKFEEYYGGTASDAIKQYFSASIGESYYWNDCRQQYYDLCRELGVEVSDLTHDLEILCREKCLAVATESNQNNSIISVLFGTGEKEDRSVKLRITKKILEAISNLKEIPKNVAPIQEIILNVAKATKETFRQVYAGNLGAPSTLEKFIAKDGQKEFDLKKLQTDLKKVIRGKSKERDWCCQEELRSYVEQNTIQYDLWAWGEMFNKAHTALKIKSTRNYNFAKQRLEQFKEIQSLNNLLVVKKLNDFFDSEFFSGEETYTICVHHLGGKDLSKLYKAWEDDPADPENAIVVLCDDLKNNFKKEPIRNILRYIFTIRQECSAQDILAAAKYNQQLDRYKSQKANPSVLGNQGFTWTNAVILPEKAQRNDRPNSLDLRIWLYLKLRHPDGRWKKHHIPFYDTRFFQEIYAAGNSPVDTCQFRTPRFGYHLPKLTDQTAIRVNKKHVKAAKTEARIRLAIQQGTLPVSNLKITEISATINSKGQVRIPVKFRVGRQKGTLQIGDRFCGYDQNQTASHAYSLWEVVKEGQYHKELRCRVRFISSGDIVSITENRGNQFDQLSYEGLAYPQYADWRKKASKFVSLWQITKKNKKKEIVTVEAKEKFDAICKYQPRLYKFNKEYAYLLRDIVRGKSLVELQQIRQEIFRFIEQDCGVTRLGSLSLSTLETVKAVKGIIYSYFSTALNASKNNPISDEQRKEFDPELFALLEKLELIRTRKKKQKVERIANSLIQTCLENNIKFIRGEGDLSTTNNATKKKANSRSMDWLARGVFNKIRQLAPMHNITLFGCGSLYTSHQDPLVHRNPDKAMKCRWAAIPVKDIGRWVLRKLSQNLRAKNIGTGEYYHQGVKEFLSHYELQDLEEELLKWRSDRKSNIPCWVLQNRLAEKLGNKEAVVYIPVRGGRIYFATHKVATGAVSIVFDQKQVWVCNADHVAAANIALTGKGIGEQSSDEENPDGGRIKLQLTS

SEQ ID NO: 140 - protein, 1054 aa, Artificial Sequence
  Synthetic sequence
MSSAIKSYKSVLRPNERKNQLLKSTIQCLEDGSAFFFKMLQGLFGGITPEIVRFSTEQEKQQQDIALWCAVNWFRPVSQDSLTHTIASDNLVEKFEEYYGGTASDAIKQYFSASIGESYYWNDCRQQYYDLCRELGVEVSDLTHDLEILCREKCLAVATESNQNNSIISVLFGTGEKEDRSVKLRITKKILEAISNLKEIPKNVAPIQEIILNVAKATKETFRQVYAGNLGAPSTLEKFIAKDGQKEFDLKKLQTDLKKVIRGKSKERDWCCQEELRSYVEQNTIQYDLWAWGEMFNKAHTALKIKSTRNYNFAKQRLEQFKEIQSLNNLLVVKKLNDFFDSEFFSGEETYTICVHHLGGKDLSKLYKAWEDDPADPENAIVVLCDDLKNNFKKEPIRNILRYIFTIRQECSAQDILAAAKYNQQLDRYKSQKANPSVLGNQGFTWTNAVILPEKAQRNDRPNSLDLRIWLYLKLRHPDGRWKKHHIPFYDTRFFQEIYAAGNSPVDTCQFRTPRFGYHLPKLTDQTAIRVNKKHVKAAKTEARIRLAIQQGTLPVSNLKITEISATINSKGQVRIPVKFRVGRQKGTLQIGDRFCGYDQNQTASHAYSLWEVVKEGQYHKELRCFVRFISSGDIVSITENRGNQFDQLSYEGLAYPQYADWRKKASKFVSLWQITKKNKKKEIVTVEAKEKFDAICKYQPRLYKFNKEYAYLLRDIVRGKSLVELQQIRQEIFRFIEQDCGVTRLGSLSLSTLETVKAVKGIIYSYFSTALNASKNNPISDEQRKEFDPELFALLEKLELIRTRKKKQKVERIANSLIQTCLENNIKFIRGEGDLSTTNNATKKKANSRSMDWLARGVFNKIRQLAPMHNITLFGCGSLYTSHQDPLVHRNPDKAMKCRWAAIPVKDIGRWVLRKLSQNLRAKNIGTGEYYHQGVKEFLSHYELQDLEEELLKWRSDRKSNIPCWVLQNRLAEKLGNKEAVVYIPVRGGRIYFATHKVATGAVSIVFDQKQVWVCNADHVAAANIALTGKGIGRQSSDEENPDGGRIKLQLTS

SEQ ID NO: 141 - protein, 1054 aa, Artificial Sequence
  Synthetic sequence
MSSAIKSYKSVLRPNERKNQLLKSTIQCLEDGSAFFFKMLQGLFGGITPEIVRFSTEQEKQQQDIALWCAVNWFRPVSQDSLTHTIASDNLVEKFEEYYGGTASDAIKQYFSASIGESYYWNDCRQQYYDLCRELGVEVSDLTHDLEILCREKCLAVATESNQNNSIISVLFGTGEKEDRSVKLRITKKILEAISNLKEIPKNVAPIQEIILNVAKATKETFRQVYAGNLGAPSTLEKFIAKDGQKEFDLKKLQTDLKKVIRGKSKERDWCCQEELRSYVEQNTIQYDLWAWGEMFNKAHTALKIKSTRNYNFAKQRLEQFKEIQSLNNLLVVKKLNDFFDSEFFSGEETYTICVHHLGGKDLSKLYKAWEDDPADPENAIVVLCDDLKNNFKKEPIRNILRYIFTIRQECSAQDILAAAKYNQQLDRYKSQKANPSVLGNQGFTWTNAVILPEKAQRNDRPNSLDLRIWLYLKLRHPDGRWKKHHIPFYDTRFFQEIYAAGNSPVDTCQFRTPRFGYHLPKLTDQTAIRVNKKHVKAAKTEARIRLAIQQGTLPVSNLKITEISATINSKGQVRIPVKFRVGRQKGTLQIGDRFCGYDQNQTASHAYSLWEVVKEGQYHKELGCRVRFISSGDIVSITENRGNQFDQLSYEGLAYPQYADWRKKASKFVSLWQITKKNKKKEIVTVEAKEKFDAICKYQPRLYKFNKEYAYLLRDIVRGKSLVELQQIRQEIFRFIEQDCGVTRLGSLSLSTLETVKAVKGIIYSYFSTALNASKNNPISDEQRKEFDPELFALLEKLELIRTRKKKQKVERIANSLIQTCLENNIKFIRGEGDLSTTNNATKKKANSRSMDWLARGVFNKIRQLAPMHNITLFGCGSLYTSHQDPLVHRNPDKAMKCRWAAIPVKDIGRWVLRKLSQNLRAKNIGTGEYYHQGVKEFLSHYELQDLEEELLKWRSDRKSNIPCWVLQNRLAEKLGNKEAVVYIPVRGGRIYFATHKVATGAVSIVFDQKQVWVCNADHVAAANIALTGKGIGRQSSDEENPDGGRIKLQLTS

SEQ ID NO: 142 - protein, 1054 aa, Artificial Sequence
  Synthetic sequence
MSSAIKSYKSVLRPNERKNQLLKSTIQCLEDGSAFFFKMLQGLFGGITPEIVRFSTEQEKQQQDIALWCAVNWFRPVSQDSLTHTIASDNLVEKFEEYYGGTASDAIKQYFSASIGESYYWNDCRQQYYDLCRELGVEVSDLTHDLEILCREKCLAVATESNQNNSIISVLFGTGEKEDRSVKLRITKKILEAISNLKEIPKNVAPIQEIILNVAKATKETFRQVYAGNLGAPSTLEKFIAKDGQKEFDLKKLQTDLKKVIRGKSKERDWCCQEELRSYVEQNTIQYDLWAWGEMFNKAHTALKIKSTRNYNFAKQRLEQFKEIQSLNNLLVVKKLNDFFDSEFFSGEETYTICVHHLGGKDLSKLYKAWEDDPADPENAIVVLCDDLKNNFKKEPIRNILRYIFTIRQECSAQDILAAAKYNQQLDRYKSQKANPSVLGNQGFTWTNAVILPEKAQRNDRPNSLDLRIWLYLKLRHPDGRWKKHHIPFYDTRFFQEIYAAGNSPVDTCQFRTPRFGYHLPKLTDQTAIRVNKKHVKAAKTEARIRLAIQQGTLPVSNLKITEISATINSKGQVRIPVKFRVGRQKRTLQIGDRFCGYDQNQTASHAYSLWEVVKEGQYHKELRCRVRFISSGDIVSITENRGNQFDQLSYEGLAYPQYADWRKKASKFVSLWQITKKNKKKEIVTVEAKEKFDAICKYQPRLYKFNKEYAYLLRDIVRGKSLVELQQIRQEIFRFIEQDCGVTRLGSLSLSTLETVKAVKGIIYSYFSTALNASKNNPISDEQRKEFDPELFALLEKLELIRTRKKKQKVERIANSLIQTCLENNIKFIRGEGDLSTTNNATKKKANSRSMDWLARGVFNKIRQLAPMHNITLFGCGSLYTSHQDPLVHRNPDKAMKCRWAAIPVKDIGRWVLRKLSQNLRAKNIGTGEYYHQGVKEFLSHYELQDLEEELLKWRSDRKSNIPCWVLQNRLAEKLGNKEAVVYIPVRGGRIYFATHKVATGAVSIVFDQKQVWVCNADHVAAANIALTGKGIGEQSSDEENPDGGRIKLQLTS

SEQ ID NO: 143 - protein, 1054 aa, Artificial Sequence
  Synthetic sequence
MSSAIKSYKSVLRPNERKNQLLKSTIQCLEDGSAFFFKMLQGLFGGITPEIVRFSTEQEKQQQDIALWCAVNWFRPVSQDSLTHTIASDNLVEKFEEYYGGTASDAIKQYFSASIGESYYWNDCRQQYYDLCRELGVEVSDLTHDLEILCREKCLAVATESNQNNSIISVLFGTGEKEDRSVKLRITKKILEAISNLKEIPKNVAPIQEIILNVAKATKETFRQVYAGNLGAPSTLEKFIAKDGQKEFDLKKLQTDLKKVIRGKSKERDWCCQEELRSYVEQNTIQYDLWAWGEMFNKAHTALKIKSTRNYNFAKQRLEQFKEIQSLNNLLVVKKLNDFFDSEFFSGEETYTICVHHLGGKDLSKLYKAWEDDPADPENAIVVLCDDLKNNFKKEPIRNILRYIFTIRQECSAQDILAAAKYNQQLDRYKSQKANPSVLGNQGFTWTNAVILPEKAQRNDRPNSLDLRIWLYLKLRHPDGRWKKHHIPFYDTRFFQEIYAAGNSPVDTCQFRTPRFGYHLPKLTDQTAIRVNKKHVKAAKTEARIRLAIQQGTLPVSNLKITEISATINSKGQVRIPVKFRVGRQKRTLQIGDRFCGYDQNQTASHAYSLWEVVKEGQYHKELRCFVRFISSGDIVSITENRGNQFDQLSYEGLAYPQYADWRKKASKFVSLWQITKKNKKKEIVTVEAKEKFDAICKYQPRLYKFNKEYAYLLRDIVRGKSLVELQQIRQEIFRFIEQDCGVTRLGSLSLSTLETVKAVKGIIYSYFSTALNASKNNPISDEQRKEFDPELFALLEKLELIRTRKKKQKVERIANSLIQTCLENNIKFIRGEGDLSTTNNATKKKANSRSMDWLARGVFNKIRQLAPMHNITLFGCGSLYTSHQDPLVHRNPDKAMKCRWAAIPVKDIGRWVLRKLSQNLRAKNIGTGEYYHQGVKEFLSHYELQDLEEELLKWRSDRKSNIPCWVLQNRLAEKLGNKEAVVYIPVRGGRIYFATHKVATGAVSIVFDQKQVWVCNADHVAAANIALTGKGIGRQSSDEENPDGGRIKLQLTS

SEQ ID NO: 144 - protein, 1054 aa, Artificial Sequence
  Synthetic sequence
MSSAIKSYKSVLRPNERKNQLLKSTIQCLEDGSAFFFKMLQGLFGGITPEIVRFSTEQEKQQQDIALWCAVNWFRPVSQDSLTHTIASDNLVEKFEEYYGGTASDAIKQYFSASIGESYYWNDCRQQYYDLCRELGVEVSDLTHDLEILCREKCLAVATESNQNNSIISVLFGTGEKEDRSVKLRITKKILEAISNLKEIPKNVAPIQEIILNVAKATKETFRQVYAGNLGAPSTLEKFIAKDGQKEFDLKKLQTDLKKVIRGKSKERDWCCQEELRSYVEQNTIQYDLWAWGEMFNKAHTALKIKSTRNYNFAKQRLEQFKEIQSLNNLLVVKKLNDFFDSEFFSGEETYTICVHHLGGKDLSKLYKAWEDDPADPENAIVVLCDDLKNNFKKEPIRNILRYIFTIRQECSAQDILAAAKYNQQLDRYKSQKANPSVLGNQGFTWTNAVILPEKAQRNDRPNSLDLRIWLYLKLRHPDGRWKKHHIPFYDTRFFQEIYAAGNSPVDTCQFRTPRFGYHLPKLTDQTAIRVNKKHVKAAKTEARIRLAIQQGTLPVSNLKITEISATINSKGQVRIPVKFRVGRQKRTLQIGDRFCGYDQNQTASHAYSLWEVVKEGQYHKELGCRVRFISSGDIVSITENRGNQFDQLSYEGLAYPQYADWRKKASKFVSLWQITKKNKKKEIVTVEAKEKFDAICKYQPRLYKFNKEYAYLLRDIVRGKSLVELQQIRQEIFRFIEQDCGVTRLGSLSLSTLETVKAVKGIIYSYFSTALNASKNNPISDEQRKEFDPELFALLEKLELIRTRKKKQKVERIANSLIQTCLENNIKFIRGEGDLSTTNNATKKKANSRSMDWLARGVFNKIRQLAPMHNITLFGCGSLYTSHQDPLVHRNPDKAMKCRWAAIPVKDIGRWVLRKLSQNLRAKNIGTGEYYHQGVKEFLSHYELQDLEEELLKWRSDRKSNIPCWVLQNRLAEKLGNKEAVVYIPVRGGRIYFATHKVATGAVSIVFDQKQVWVCNADHVAAANIALTGKGIGRQSSDEENPDGGRIKLQLTS

SEQ ID NO: 145 - protein, 1054 aa, Artificial Sequence
  Synthetic sequence
MSSAIKSYKSVLRPNERKNQLLKSTIQCLEDGSAFFFKMLQGLFGGITPEIVRFSTEQEKQQQDIALWCAVNWFRPVSQDSLTHTIASDNLVEKFEEYYGGTASDAIKQYFSASIGESYYWNDCRQQYYDLCRELGVEVSDLTHDLEILCREKCLAVATESNQNNSIISVLFGTGEKEDRSVKLRITKKILEAISNLKEIPKNVAPIQEIILNVAKATKETFRQVYAGNLGAPSTLEKFIAKDGQKEFDLKKLQTDLKKVIRGKSKERDWCCQEELRSYVEQNTIQYDLWAWGEMFNKAHTALKIKSTRNYNFAKQRLEQFKEIQSLNNLLVVKKLNDFFDSEFFSGEETYTICVHHLGGKDLSKLYKAWEDDPADPENAIVVLCDDLKNNFKKEPIRNILRYIFTIRQECSAQDILAAAKYNQQLDRYKSQKANPSVLGNQGFTWTNAVILPEKAQRNDRPNSLDLRIWLYLKLRHPDGRWKKHHIPFYDTRFFQEIYAAGNSPVDTCQFRTPRFGYHLPKLTDQTAIRVNKKHVKAAKTEARIRLAIQQGTLPVSNLKITEISATINSKGQVRIPVKFRVGRQKGTLQIGDRFCGYDQNQTASHAYSLWEVVKEGQYHKELRCRVRFISSGDIVSITENRGNQFDQLSYEGLAYPQYADWRKKASKFVSLWQITKKNKKKEIVTVEAKEKFDAICKYQPRLYKFNKEYAYLLRDIVRGKSLVELQQIRQEIFRFIEQDCGVTRLGSLSLSTLETVKAVKGIIYSYFSTALNASKNNPISDEQRKEFDPELFALLEKLELIRTRKKKQKVERIANSLIQTCLENNIKFIRGEGDLSTTNNATKKKANSRSMDWLARGVFNKIRQLAPMHNITLFGCGSLYTSHQDPLVHRNPDKAMKCRWAAIPVKDIGRWVLRKLSQNLRAKNIGTGEYYHQGVKEFLSHYELQDLEEELLKWRSDRKSNIPCWVLQNRLAEKLGNKEAVVYIPVRGGRIYFATHKVATGAVSIVFDQKQVWVCNADHVAAANIALTGKGIGRQSSDEENPDGGRIKLQLTS

SEQ ID NO: 146 - protein, 1054 aa, Artificial Sequence
  Synthetic sequence
MSSAIKSYKSVLRPNERKNQLLKSTIQCLEDGSAFFFKMLQGLFGGITPEIVRFSTEQEKQQQDIALWCAVNWFRPVSQDSLTHTIASDNLVEKFEEYYGGTASDAIKQYFSASIGESYYWNDCRQQYYDLCRELGVEVSDLTHDLEILCREKCLAVATESNQNNSIISVLFGTGEKEDRSVKLRITKKILEAISNLKEIPKNVAPIQEIILNVAKATKETFRQVYAGNLGAPSTLEKFIAKDGQKEFDLKKLQTDLKKVIRGKSKERDWCCQEELRSYVEQNTIQYDLWAWGEMFNKAHTALKIKSTRNYNFAKQRLEQFKEIQSLNNLLVVKKLNDFFDSEFFSGEETYTICVHHLGGKDLSKLYKAWEDDPADPENAIVVLCDDLKNNFKKEPIRNILRYIFTIRQECSAQDILAAAKYNQQLDRYKSQKANPSVLGNQGFTWTNAVILPEKAQRNDRPNSLDLRIWLYLKLRHPDGRWKKHHIPFYDTRFFQEIYAAGNSPVDTCQFRTPRFGYHLPKLTDQTAIRVNKKHVKAAKTEARIRLAIQQGTLPVSNLKITEISATINSKGQVRIPVKFRVGRQKRTLQIGDRFCGYDQNQTASHAYSLWEVVKEGQYHKELRCRVRFISSGDIVSITENRGNQFDQLSYEGLAYPQYADWRKKASKFVSLWQITKKNKKKEIVTVEAKEKFDAICKYQPRLYKFNKEYAYLLRDIVRGKSLVELQQIRQEIFRFIEQDCGVTRLGSLSLSTLETVKAVKGIIYSYFSTALNASKNNPISDEQRKEFDPELFALLEKLELIRTRKKKQKVERIANSLIQTCLENNIKFIRGEGDLSTTNNATKKKANSRSMDWLARGVFNKIRQLAPMHNITLFGCGSLYTSHQDPLVHRNPDKAMKCRWAAIPVKDIGRWVLRKLSQNLRAKNIGTGEYYHQGVKEFLSHYELQDLEEELLKWRSDRKSNIPCWVLQNRLAEKLGNKEAVVYIPVRGGRIYFATHKVATGAVSIVFDQKQVWVCNADHVAAANIALTGKGIGRQSSDEENPDGGRIKLQLTS

SEQ ID NO: 147 - RNA, 43 nt, Artificial Sequence
  Synthetic sequence
agaaatccgtctttcattgacggggtgagggaggagagatgcc

SEQ ID NO: 148 - RNA, 43 nt, Artificial Sequence
  Synthetic sequence
agaaatccgtctttcattgacggtgtgcccgtggggacccccg

SEQ ID NO: 149 - RNA, 43 nt, Artificial Sequence
  Synthetic sequence
agaaatccgtctttcattgacggtggataaaacttctcggagg

SEQ ID NO: 150 - DNA, 648 bp, Artificial Sequence
  Synthetic sequence
tttctgtctgcagcttgtggcctgggtcacctctacggctggcccagatccttccctgccgcctccttcaggttccgtcttcctccactccctcttccccttgctctctgctgtgttgctgcccaaggatgctctttccggagcacttccttctcggcgctgcaccacgtgatgtcctctgagcggatcctccccgtgtctgggtcctctccgggcatctctcctccctcacccaaccccatgccgtcttcactcgctgggttcccttttccttctccttctggggcctgtgccatctctcgtttcttaggatggccttctccgacggatgtctcccttgcgtcccgcctccccttcttgtaggcctgcatcatcaccgtttttctggacaaccccaaagtaccccgtctccctggctttagccacctctccatcctcttgctttctttgcctggacaccccgttctcctgtggattcgggtcacctctcactcctttcatttgggcagctcccctaccccccttacctctctagtctgtgctagctcttccagccccctgtcatggcatcttccaggggtccgagagctcagctagtcttcttcctccaacccgggcccctatgtccacttcaggacagcatgtttg

SEQ ID NO: 151 - DNA, 523 bp, Artificial Sequence
  Synthetic sequence
gaccttaatacttaccatggctttggaccagggaactagggggatagtgagagcagggagagggaagtgtggggaaggtacaggggacctcgacagtgaagcattctggggttttcctcctgcatttcgagctccccagcccccaacatctggttagtctttaacttcctcgggttcataaccatagcagtccaggagtggtgggcatattctgtgcccgtggggacccccggttgtgtcctgttcgactcagaagacttggagaagccagaggctgttggtgggagggaagtgaggagggaggaggggctgggtggctgggcctgtgcaccccagcccctgcccatgcccatgccttgctctctttctgtcctcagtggtcccaggctgcacccatggcagaaggaggagggcagaatcatcacgaaggtgagtccccctggctgttggatggggttccctgtcctctcaggggatgggtggatggcctaattcctttttcttcagaactgtggggaggaag

SEQ ID NO: 152 - DNA, 578 bp, Artificial Sequence
  Synthetic sequence
aacaggcctgagcatcttagctctgggaggcagaggccaagcctgtctgtttcttacaggacccagctcagtgcccgggatggagtacatgctcaataaacatgtattgaattaatgagcacatttctctttgcccatacaaatacacactaactttatcagtcattccccttgctctctgctgtcattgctccctccctgtccctctccttctatctttcccttgtactttcacagctgattgttgatttagattatgcatataccagtttgtggataaaacttctcggagggttactcagatcagtgtgtgaatgagctcttaatccagatctcagaagtctgtgcactccccaagctttagccgggtgctaggaggtgggcaacctgggtgactctgtgtgtttagtgggagtggggtattcgtgctgggatggccagtgcctcaatctaggagatgagggaagagccctgggcaagggctagttctcccttcaggttctaatgacttgttcctcactgcttgggtgccgccctggagtatgaccaggaaggtaccagtctaagcttcagtcctg

SEQ ID NO: 153 - DNA, 25 bp, Artificial Sequence
  Synthetic sequence
tttctgtctgcagcttgtggcctgg

SEQ ID NO: 154 - DNA, 31 bp, Artificial Sequence
  Synthetic sequence
gcaaacatgctgtcctgaagtggacataggg

SEQ ID NO: 155 - DNA, 33 bp, Artificial Sequence
  Synthetic sequence
gaccttaatacttaccatggctttggaccaggg

SEQ ID NO: 156 - DNA, 29 bp, Artificial Sequence
  Synthetic sequence
cttcctccccacagttctgaagaaaaagg

SEQ ID NO: 157 - DNA, 26 bp, Artificial Sequence
  Synthetic sequence
aacaggcctgagcatcttagctctgg

SEQ ID NO: 158 - DNA, 29 bp, Artificial Sequence
  Synthetic sequence
caggactgaagcttagactggtaccttcc

SEQ ID NO: 159 - DNA, 2774 bp, Artificial Sequence
  Synthetic sequence
ccccttgtattactgtttatgtaagcagacaggatgcgtccggcgtagaggatcgagatctccaaaaaatggctgtttttgaaaaaaattctaaaggttgttttacgacagacgataacagggttgaaataattttgtttaactttaagaaggagatttaaatatgaaaatcgaagaaggtaaaggtcaccatcaccatcaccacggatccatgacggcattgacggaaggtgcaaaactgtttgagaaagagatcccgtatatcaccgaactggaaggcgacgtcgaaggtatgaaatttatcattaaaggcgagggtaccggtgacgcgaccacgggtaccattaaagcgaaatacatctgcactacgggcgacctgccggtcccgtgggcaaccctggtgagcaccctgagctacggtgttcagtgtttcgccaagtacccgagccacatcaaggatttctttaagagcgccatgccggaaggttatacccaagagcgtaccatcagcttcgaaggcgacggcgtgtacaagacgcgtgctatggttacctacgaacgcggttctatctacaatcgtgtcacgctgactggtgagaactttaagaaagacggtcacattctgcgtaagaacgttgcattccaatgcccgccaagcattctgtatattctgcctgacaccgttaacaatggcatccgcgttgagttcaaccaggcgtacgatattgaaggtgtgaccgaaaaactggttaccaaatgcagccaaatgaatcgtccgttggcgggctccgcggcagtgcatatcccgcgttatcatcacattacctaccacaccaaactgagcaaagaccgcgacgagcgccgtgatcacatgtgtctggtagaggtcgtgaaagcggttgatctggacacgtatcagtaataaaaagcccgaaaggaagctgagttggctgctgccaccgctgagcaataactagcataaccccttggggcctctaaacgggtcttgaggggttttttgctgaaaggaggaactatatccggcttcctcgctcactgactcgctgcgctcggtcgttcggctgcggcgagcggtatcagctcactcaaaggcggtaatacggttatccacagaatcaggggataacgcaggaaagaacatgtgagcaaaaggccagcaaaaggccaggaaccgtaaaaaggccgcgttgctggcgtttttccataggctccgcccccctgacgagcatcacaaaaatcgacgctcaagtcagaggtggcgaaacccgacaggactataaagataccaggcgtttccccctggaagctccctcgtgcgctctcctgttccgaccctgccgcttaccggatacctgtccgcctttctcccttcgggaagcgtggcgctttctcatagctcacgctgtaggtatctcagttcggtgtaggtcgttcgctccaagctgggctgtgtgcacgaaccccccgttcagcccgaccgctgcgccttatccggtaactatcgtcttgagtccaacccggtaagacacgacttatcgccactggcagcagccactggtaacaggattagcagagcgaggtatgtaggcggtgctacagagttcttgaagtggtggcctaactacggctacactagaagaacagtatttggtatctgcgctctgctgaagccagttaccttcggaaaaagagttggtagctcttgatccggcaaacaaaccaccgctggtagcggtggtttttttgtttgcaagcagcagattacgcgcagaaaaaaaggatctcaagaagatcctttgatcttttctacggggtctgacgctcagtggaacgaaaactcacgggtggcacttttcggggaaatgtgcgcggaacccctatttgtttatttttctaaatacattcaaatatgtatccgctcatgaattaattcttagaaaaactcatcgagcatcaaatgaaactgcaatttattcatatcaggattatcaataccatatttttgaaaaagccgtttctgtaatgaaggagaaaactcaccgaggcagttccataggatggcaagatcctggtatcggtctgcgattccgactcgtccaacatcaatacaacctattaatttcccctcgtcaaaaataaggttatcaagtgagaaatcaccatgagtgacgactgaatccggtgagaatggcaaaagtttatgcatttctttccagacttgttcaacaggccagccattacgctcgtcatcaaaatcactcgcatcaaccaaaccgttattcattcgtgattgcgcctgagcgagacgaaatacgcgatcgctgttaaaaggacaattacaaacaggaatcgaatgcaaccggcgcaggaacactgccagcgcatcaacaatattttcacctgaatcaggatattcttctaatacctggaatgctgttttcccggggatcgcagtggtgagtaaccatgcatcatcaggagtacggataaaatgcttgatggtcggaagaggcataaattccgtcagccagtttagtctgaccatctcatctgtaacatcattggcaacgctacctttgccatgtttcagaaacaactctggcgcatcgggcttcccatacaatcgatagattgtcgcacctgattgcccgacattatcgcgagcccatttatacccatataaatcagcatccatgttggaatttaatcgcggcctagagcaagacgtttcccgttgaatatggctcataaca

SEQ ID NO: 160 - DNA, 2774 bp, Artificial Sequence; identical to SEQ ID NO: 159
  Synthetic sequence

SEQ ID NO: 161 - DNA, 153 bp, Artificial Sequence
  Synthetic sequence
gaaattaatacgactcactataggttgcaaaacccaagaaatccgtctttcattgacggtaaaggttgttttacgacagacgataacagggttgcaaaacccaagaaatccgtctttcattgacggctaacccctctctaaacggaggggttt

SEQ ID NO: 162 - DNA, 31 bp, Artificial Sequence
  Synthetic sequence
taaaggttgttttacgacagacgataacagg

SEQ ID NO: 163 - DNA, 153 bp, Artificial Sequence
  Synthetic sequence
gaaattaatacgactcactataggttgcaaaacccaagaaatccgtctttcattgacggagtgtttcgccaagtacccgagccacatcaagttgcaaaacccaagaaatccgtctttcattgacggctaacccctctctaaacggaggggttt

SEQ ID NO: 164 - DNA, 31 bp, Artificial Sequence
  Synthetic sequence
agtgtttcgccaagtacccgagccacatcaa

SEQ ID NO: 165 - DNA, 153 bp, Artificial Sequence
  Synthetic sequence
gaaattaatacgactcactataggttgcaaaacccaagaaatccgtctttcattgacgggccaagtacccgagccacatcaaggatttctgttgcaaaacccaagaaatccgtctttcattgacggctaacccctctctaaacggaggggttt

SEQ ID NO: 166 - DNA, 31 bp, Artificial Sequence
  Synthetic sequence
gccaagtacccgagccacatcaaggatttct

SEQ ID NO: 167 - DNA, 153 bp, Artificial Sequence
  Synthetic sequence
gaaattaatacgactcactataggttgcaaaacccaagaaatccgtctttcattgacggtttaagagcgccatgccggaaggttatacccgttgcaaaacccaagaaatccgtctttcattgacggctaacccctctctaaacggaggggttt

SEQ ID NO: 168 - DNA, 31 bp, Artificial Sequence
  Synthetic sequence
tttaagagcgccatgccggaaggttataccc

SEQ ID NO: 169 - DNA, 153 bp, Artificial Sequence
  Synthetic sequence
gaaattaatacgactcactataggttgcaaaacccaagaaatccgtctttcattgacgggaaggcgacggcgtgtacaagacgcgtgctagttgcaaaacccaagaaatccgtctttcattgacggctaacccctctctaaacggaggggttt

SEQ ID NO: 170 - DNA, 31 bp, Artificial Sequence
  Synthetic sequence
gaaggcgacggcgtgtacaagacgcgtgcta

SEQ ID NO: 171 - DNA, 153 bp, Artificial Sequence
  Synthetic sequence
gaaattaatacgactcactataggttgcaaaacccaagaaatccgtctttcattgacggtatctacaatcgtgtcacgctgactggtgaggttgcaaaacccaagaaatccgtctttcattgacggctaacccctctctaaacggaggggttt

SEQ ID NO: 172 - DNA, 31 bp, Artificial Sequence
  Synthetic sequence
tatctacaatcgtgtcacgctgactggtgag

SEQ ID NO: 173 - DNA, 153 bp, Artificial Sequence
  Synthetic sequence
gaaattaatacgactcactataggttgcaaaacccaagaaatccgtctttcattgacggtgcgtaagaacgttgcattccaatgcccgccgttgcaaaacccaagaaatccgtctttcattgacggctaacccctctctaaacggaggggttt

SEQ ID NO: 174 - DNA, 31 bp, Artificial Sequence
  Synthetic sequence
tgcgtaagaacgttgcattccaatgcccgcc

SEQ ID NO: 175 - DNA, 153 bp, Artificial Sequence
  Synthetic sequence
gaaattaatacgactcactataggttgcaaaacccaagaaatccgtctttcattgacggcaatgcccgccaagcattctgtatattctgcgttgcaaaacccaagaaatccgtctttcattgacggctaacccctctctaaacggaggggttt

SEQ ID NO: 176 - DNA, 31 bp, Artificial Sequence
  Synthetic sequence
caatgcccgccaagcattctgtatattctgc

SEQ ID NO: 177 - DNA, 153 bp, Artificial Sequence
  Synthetic sequence
gaaattaatacgactcactataggttgcaaaacccaagaaatccgtctttcattgacggtgcctgacaccgttaacaatggcatccgcgtgttgcaaaacccaagaaatccgtctttcattgacggctaacccctctctaaacggaggggttt

SEQ ID NO: 178 - DNA, 31 bp, Artificial Sequence
  Synthetic sequence
tgcctgacaccgttaacaatggcatccgcgt

SEQ ID NO: 179 - DNA, 153 bp, Artificial Sequence
  Synthetic sequence
gaaattaatacgactcactataggttgcaaaacccaagaaatccgtctttcattgacggaaccaggcgtacgatattgaaggtgtgaccggttgcaaaacccaagaaatccgtctttcattgacggctaacccctctctaaacggaggggttt

SEQ ID NO: 180 - DNA, 31 bp, Artificial Sequence
  Synthetic sequence
aaccaggcgtacgatattgaaggtgtgaccg

SEQ ID NO: 181 - DNA, 153 bp, Artificial Sequence
  Synthetic sequence
gaaattaatacgactcactataggttgcaaaacccaagaaatccgtctttcattgacggaaccctgttatcgtctgtcgtaaaacaacctgttgcaaaacccaagaaatccgtctttcattgacggctaacccctctctaaacggaggggttt

SEQ ID NO: 182 - DNA, 31 bp, Artificial Sequence
  Synthetic sequence
aaccctgttatcgtctgtcgtaaaacaacct

SEQ ID NO: 183 - DNA, 153 bp, Artificial Sequence
  Synthetic sequence
gaaattaatacgactcactataggttgcaaaacccaagaaatccgtctttcattgacggtcaaacagttttgcaccttccgtcaatgccggttgcaaaacccaagaaatccgtctttcattgacggctaacccctctctaaacggaggggttt

SEQ ID NO: 184 - DNA, 31 bp, Artificial Sequence
  Synthetic sequence
tcaaacagttttgcaccttccgtcaatgccg

SEQ ID NO: 185 - DNA, 153 bp, Artificial Sequence
  Synthetic sequence
gaaattaatacgactcactataggttgcaaaacccaagaaatccgtctttcattgacggataccttcgacgtcgccttccagttcggtgagttgcaaaacccaagaaatccgtctttcattgacggctaacccctctctaaacggaggggttt

SEQ ID NO: 186 - DNA, 31 bp, Artificial Sequence
  Synthetic sequence
ataccttcgacgtcgccttccagttcggtga

SEQ ID NO: 187 - DNA, 153 bp, Artificial Sequence
  Synthetic sequence
gaaattaatacgactcactataggttgcaaaacccaagaaatccgtctttcattgacgggctttaatggtacccgtggtcgcgtcaccgggttgcaaaacccaagaaatccgtctttcattgacggctaacccctctctaaacggaggggttt

SEQ ID NO: 188 - DNA, 31 bp, Artificial Sequence
  Synthetic sequence
gctttaatggtacccgtggtcgcgtcaccgg

SEQ ID NO: 189 - DNA, 153 bp, Artificial Sequence
  Synthetic sequence
gaaattaatacgactcactataggttgcaaaacccaagaaatccgtctttcattgacgggaagctgatggtacgctcttgggtataacctgttgcaaaacccaagaaatccgtctttcattgacggctaacccctctctaaacggaggggttt

SEQ ID NO: 190 - DNA, 31 bp, Artificial Sequence
  Synthetic sequence
gaagctgatggtacgctcttgggtataacct

SEQ ID NO: 191 - DNA, 153 bp, Artificial Sequence
  Synthetic sequence
gaaattaatacgactcactataggttgcaaaacccaagaaatccgtctttcattgacgggtaggtaaccatagcacgcgtcttgtacacggttgcaaaacccaagaaatccgtctttcattgacggctaacccctctctaaacggaggggttt

SEQ ID NO: 192 - DNA, 31 bp, Artificial Sequence
  Synthetic sequence
gtaggtaaccatagcacgcgtcttgtacacg

SEQ ID NO: 193 - DNA, 153 bp, Artificial Sequence
  Synthetic sequence
gaaattaatacgactcactataggttgcaaaacccaagaaatccgtctttcattgacggtcaccagtcagcgtgacacgattgtagataggttgcaaaacccaagaaatccgtctttcattgacggctaacccctctctaaacggaggggttt

SEQ ID NO: 194 - DNA, 31 bp, Artificial Sequence
  Synthetic sequence
tcaccagtcagcgtgacacgattgtagatag

SEQ ID NO: 195 - DNA, 153 bp, Artificial Sequence
  Synthetic sequence
gaaattaatacgactcactataggttgcaaaacccaagaaatccgtctttcattgacggttaaagttctcaccagtcagcgtgacacgatgttgcaaaacccaagaaatccgtctttcattgacggctaacccctctctaaacggaggggttt

SEQ ID NO: 196 - DNA, 31 bp, Artificial Sequence
  Synthetic sequence
ttaaagttctcaccagtcagcgtgacacgat

SEQ ID NO: 197 - DNA, 153 bp, Artificial Sequence
  Synthetic sequence
gaaattaatacgactcactataggttgcaaaacccaagaaatccgtctttcattgacggttacgcagaatgtgaccgtctttcttaaagtgttgcaaaacccaagaaatccgtctttcattgacggctaacccctctctaaacggaggggttt

SEQ ID NO: 198 - DNA, 31 bp, Artificial Sequence
  Synthetic sequence
ttacgcagaatgtgaccgtctttcttaaagt

SEQ ID NO: 199 - DNA, 153 bp, Artificial Sequence
  Synthetic sequence
gaaattaatacgactcactataggttgcaaaacccaagaaatccgtctttcattgacggggtcacaccttcaatatcgtacgcctggttggttgcaaaacccaagaaatccgtctttcattgacggctaacccctctctaaacggaggggttt

SEQ ID NO: 200 - DNA, 31 bp, Artificial Sequence
  Synthetic sequence
ggtcacaccttcaatatcgtacgcctggttg

SEQ ID NO: 201 - DNA, 153 bp, Artificial Sequence
  Synthetic sequence
gaaattaatacgactcactataggttgcaaaacccaagaaatccgtctttcattgacgggtgattgcgcctgagcgagacgaaatacgcggttgcaaaacccaagaaatccgtctttcattgacggctaacccctctctaaacggaggggttt

SEQ ID NO: 202 - DNA, 43 bp, Artificial Sequence
  Synthetic sequence
agaaatccgtctttcattgacggtgtccccccaagttttggac

SEQ ID NO: 203 - DNA, 20 bp, Artificial Sequence
  Synthetic sequence
tgtccccccaagttttggac

SEQ ID NO: 204 - DNA, 43 bp, Artificial Sequence
  Synthetic sequence
agaaatccgtctttcattgacggggagaggtgagggacttggg

SEQ ID NO: 205 - DNA, 20 bp, Artificial Sequence
  Synthetic sequence
ggagaggtgagggacttggg

SEQ ID NO: 206 - DNA, 43 bp, Artificial Sequence
  Synthetic sequence
agaaatccgtctttcattgacgggtgagaatggtgcgtcctag

SEQ ID NO: 207 - DNA, 20 bp, Artificial Sequence
  Synthetic sequence
gtgagaatggtgcgtcctag

SEQ ID NO: 208 - DNA, 43 bp, Artificial Sequence
  Synthetic sequence
agaaatccgtctttcattgacggggggttgtccagaaaaacgg

SEQ ID NO: 209 - DNA, 20 bp, Artificial Sequence
  Synthetic sequence
ggggttgtccagaaaaacgg

SEQ ID NO: 210 - DNA, 43 bp, Artificial Sequence
  Synthetic sequence
agaaatccgtctttcattgacggaactggccctggctttggca

SEQ ID NO: 211 - DNA, 20 bp, Artificial Sequence
  Synthetic sequence
aactggccctggctttggca

SEQ ID NO: 212 - DNA, 43 bp, Artificial Sequence
  Synthetic sequence
agaaatccgtctttcattgacgggggcgcagggccacctggac

SEQ ID NO: 213 - DNA, 20 bp, Artificial Sequence
  Synthetic sequence
gggcgcagggccacctggac

SEQ ID NO: 214 - DNA, 43 bp, Artificial Sequence
  Synthetic sequence
agaaatccgtctttcattgacggggatggcgacttcaggcaca

SEQ ID NO: 215 - DNA, 20 bp, Artificial Sequence
  Synthetic sequence
ggatggcgacttcaggcaca

SEQ ID NO: 216 - DNA, 43 bp, Artificial Sequence
  Synthetic sequence
agaaatccgtctttcattgacggatgtgattgatgcccaaagg

SEQ ID NO: 217 - DNA, 20 bp, Artificial Sequence
  Synthetic sequence
atgtgattgatgcccaaagg

SEQ ID NO: 218 - DNA, 43 bp, Artificial Sequence
  Synthetic sequence
agaaatccgtctttcattgacggggggaggcctggagtcatgg

SEQ ID NO: 219 - DNA, 20 bp, Artificial Sequence
  Synthetic sequence
ggggaggcctggagtcatgg

SEQ ID NO: 220 - DNA, 43 bp, Artificial Sequence
  Synthetic sequence
agaaatccgtctttcattgacggtattattcccatagggaagg

SEQ ID NO: 221 - DNA, 20 bp, Artificial Sequence
  Synthetic sequence
tattattcccatagggaagg

SEQ ID NO: 222 - DNA, 43 bp, Artificial Sequence
  Synthetic sequence
agaaatccgtctttcattgacggtgggggtgaccgccggagcg

SEQ ID NO: 223 - DNA, 20 bp, Artificial Sequence
  Synthetic sequence
tgggggtgaccgccggagcg

SEQ ID NO: 224 - DNA, 43 bp, Artificial Sequence
  Synthetic sequence
agaaatccgtctttcattgacggaatcctccaccagtcatggt

SEQ ID NO: 225 - DNA, 20 bp, Artificial Sequence
  Synthetic sequence
aatcctccaccagtcatggt

SEQ ID NO: 226 - DNA, 43 bp, Artificial Sequence
  Synthetic sequence
agaaatccgtctttcattgacgggttgacattgtccacacctg

SEQ ID NO: 227 - DNA, 20 bp, Artificial Sequence
  Synthetic sequence
gttgacattgtccacacctg

SEQ ID NO: 228 - DNA, 43 bp, Artificial Sequence
  Synthetic sequence
agaaatccgtctttcattgacggggaaatctattgaggctctg

SEQ ID NO: 229 - DNA, 20 bp, Artificial Sequence
  Synthetic sequence
ggaaatctattgaggctctg

SEQ ID NO: 230 - DNA, 43 bp, Artificial Sequence
  Synthetic sequence
agaaatccgtctttcattgacggttaaactctccatggaccag

SEQ ID NO: 231 - DNA, 20 bp, Artificial Sequence
  Synthetic sequence
ttaaactctccatggaccag

SEQ ID NO: 232 - DNA, 20 bp, Artificial Sequence
  Synthetic sequence
ggtgagggaggagagatgcc

SEQ ID NO: 233 - DNA, 43 bp, Artificial Sequence
  Synthetic sequence
agaaatccgtctttcattgacggtcttgagatgggctcgggct

SEQ ID NO: 234 - DNA, 20 bp, Artificial Sequence
  Synthetic sequence
tcttgagatgggctcgggct

SEQ ID NO: 235 - DNA, 43 bp, Artificial Sequence
  Synthetic sequence
agaaatccgtctttcattgacggtccgctctgagcaaggccca

SEQ ID NO: 236 - DNA, 20 bp, Artificial Sequence
  Synthetic sequence
tccgctctgagcaaggccca

SEQ ID NO: 237 - RNA, 43 nt, Artificial Sequence
  Synthetic Construct
agaaauccgucuuucauugacggaaugucggauggaugaaacc

SEQ ID NO: 238 - RNA, 43 nt, Artificial Sequence
  Synthetic Construct
agaaauccgucuuucauugacggcuaucucuuguacuacacug

SEQ ID NO: 239 - RNA, 43 nt, Artificial Sequence
  Synthetic Construct
agaaauccgucuuucauugacggacacggcaggcauacucauc

SEQ ID NO: 240 - RNA, 42 nt, Artificial Sequence
  Synthetic Construct
agaaauccgucuuucauugacgggucacagccaagauaguua

SEQ ID NO: 241 - RNA, 100 nt, Artificial Sequence
  Synthetic Construct
ggccgagaugucucgcuccgguuuuagagcuagaaauagcaaguuaaaauaaggcuaguccguuaucaacuugaaaaaguggcaccgagucggugcuuuu

SEQ ID NO: 242 - RNA, 43 nt, Artificial Sequence
  Synthetic Construct
agaaauccgucuuucauugacggaagagcaacagugcuguggc

SEQ ID NO: 243 - RNA, 43 nt, Artificial Sequence
  Synthetic Construct
agaaauccgucuuucauugacggaacaacagcauuauuccaga

SEQ ID NO: 244 - RNA, 43 nt, Artificial Sequence
  Synthetic Construct
agaaauccgucuuucauugacgggaaacagguaagacaggggu

SEQ ID NO: 245 - RNA, 43 nt, Artificial Sequence
  Synthetic Construct
agaaauccgucuuucauugacggcaggaggaggauucggaacc

SEQ ID NO: 246 - RNA, 100 nt, Artificial Sequence
  Synthetic Construct
aaguuccugugaugucaagcguuuuagagcuagaaauagcaaguuaaaauaaggcuaguccguuaucaacuugaaaaaguggcaccgagucggugcuuuu

SEQ ID NO: 247 - RNA, 43 nt, Artificial Sequence
  Synthetic Construct
agaaauccgucuuucauugacgguuagguagguggggucggcg

SEQ ID NO: 248 - RNA, 43 nt, Artificial Sequence
  Synthetic Construct
agaaauccgucuuucauugacggcccgaggaccgcagccagcc

SEQ ID NO: 249 - RNA, 43 nt, Artificial Sequence
  Synthetic Construct
agaaauccgucuuucauugacggcgugucacacaacugcccaa

SEQ ID NO: 250 - RNA, 43 nt, Artificial Sequence
  Synthetic Construct
agaaauccgucuuucauugacggcacaugagcguggucagggc

SEQ ID NO: 251 - RNA, 100 nt, Artificial Sequence
  Synthetic Construct
uccaggcaugcagaucccacguuuuagagcuagaaauagcaaguuaaaauaaggcuaguccguuaucaacuugaaaaaguggcaccgagucggugcuuuu

SEQ ID NO: 252 - DNA, 20 bp, Artificial Sequence
  Synthetic sequence
tgtccccccaagttttggac

SEQ ID NO: 253 - DNA, 43 bp, Artificial Sequence; identical to SEQ ID NO: 202
  Synthetic sequence

SEQ ID NO: 254 - DNA, 20 bp, Artificial Sequence
  Synthetic sequence
ggagaggtgagggacttggg

SEQ ID NO: 255 - DNA, 43 bp, Artificial Sequence; identical to SEQ ID NO: 204
  Synthetic sequence

SEQ ID NO: 256 - DNA, 20 bp, Artificial Sequence
  Synthetic sequence
gtgagaatggtgcgtcctag

SEQ ID NO: 257 - DNA, 43 bp, Artificial Sequence; identical to SEQ ID NO: 206
  Synthetic sequence

SEQ ID NO: 258 - DNA, 20 bp, Artificial Sequence
  Synthetic sequence
ggggttgtccagaaaaacgg

SEQ ID NO: 259 - DNA, 43 bp, Artificial Sequence; identical to SEQ ID NO: 208
  Synthetic sequence

SEQ ID NO: 260 - DNA, 20 bp, Artificial Sequence
  Synthetic sequence
aactggccctggctttggca

SEQ ID NO: 261 - DNA, 43 bp, Artificial Sequence; identical to SEQ ID NO: 210
  Synthetic sequence

SEQ ID NO: 262 - DNA, 20 bp, Artificial Sequence
  Synthetic sequence
gtagcctctcccgctctggt

SEQ ID NO: 263 - DNA, 43 bp, Artificial Sequence
  Synthetic sequence
agaaatccgtctttcattgacgggtagcctctcccgctctggt

SEQ ID NO: 264 - DNA, 20 bp, Artificial Sequence
  Synthetic sequence
gggaagtggttggtcagcat

SEQ ID NO: 265 - DNA, 43 bp, Artificial Sequence
  Synthetic sequence
agaaatccgtctttcattgacgggggaagtggttggtcagcat

SEQ ID NO: 266 - DNA, 20 bp, Artificial Sequence
  Synthetic sequence
agcgggtatgggaagggctt

SEQ ID NO: 267 - DNA, 43 bp, Artificial Sequence
  Synthetic sequence
agaaatccgtctttcattgacggagcgggtatgggaagggctt

SEQ ID NO: 268 - DNA, 20 bp, Artificial Sequence
  Synthetic sequence
gggcgcagggccacctggac

SEQ ID NO: 269 - DNA, 43 bp, Artificial Sequence; identical to SEQ ID NO: 212
  Synthetic sequence

SEQ ID NO: 270 - DNA, 20 bp, Artificial Sequence
  Synthetic sequence
ggatggcgacttcaggcaca

SEQ ID NO: 271 - DNA, 43 bp, Artificial Sequence; identical to SEQ ID NO: 214
  Synthetic sequence

SEQ ID NO: 272 - DNA, 20 bp, Artificial Sequence
  Synthetic sequence
atgtgattgatgcccaaagg

SEQ ID NO: 273 - DNA, 43 bp, Artificial Sequence; identical to SEQ ID NO: 216
  Synthetic sequence

SEQ ID NO: 274 - DNA, 20 bp, Artificial Sequence
  Synthetic sequence
ggggaggcctggagtcatgg

SEQ ID NO: 275 - DNA, 43 bp, Artificial Sequence; identical to SEQ ID NO: 218
  Synthetic sequence

SEQ ID NO: 276 - DNA, 20 bp, Artificial Sequence
  Synthetic sequence
tattattcccatagggaagg

SEQ ID NO: 277 - DNA, 43 bp, Artificial Sequence; identical to SEQ ID NO: 220
  Synthetic sequence

SEQ ID NO: 278 - DNA, 20 bp, Artificial Sequence
  Synthetic sequence
gagccagtgttgctagtcaa

SEQ ID NO: 279 - DNA, 43 bp, Artificial Sequence
  Synthetic sequence
agaaatccgtctttcattgacgggagccagtgttgctagtcaa

SEQ ID NO: 280 - DNA, 20 bp, Artificial Sequence
  Synthetic sequence
agcaagggactattcaggga

SEQ ID NO: 281 - DNA, 43 bp, Artificial Sequence
  Synthetic sequence
agaaatccgtctttcattgacggagcaagggactattcaggga

SEQ ID NO: 282 - DNA, 20 bp, Artificial Sequence
  Synthetic sequence
aaaattgagcaatctaccct

SEQ ID NO: 283 - DNA, 43 bp, Artificial Sequence
  Synthetic sequence
agaaatccgtctttcattgacggaaaattgagcaatctaccct

SEQ ID NO: 284 - DNA, 20 bp, Artificial Sequence
  Synthetic sequence
tgggggtgaccgccggagcg

SEQ ID NO: 285 - DNA, 43 bp, Artificial Sequence; identical to SEQ ID NO: 222
  Synthetic sequence

SEQ ID NO: 286 - DNA, 20 bp, Artificial Sequence
  Synthetic sequence
aatcctccaccagtcatggt

SEQ ID NO: 287 - DNA, 43 bp, Artificial Sequence; identical to SEQ ID NO: 224
  Synthetic sequence

SEQ ID NO: 288 - DNA, 20 bp, Artificial Sequence
  Synthetic sequence
gttgacattgtccacacctg

SEQ ID NO: 289 - DNA, 43 bp, Artificial Sequence; identical to SEQ ID NO: 226
  Synthetic sequence

SEQ ID NO: 290 - DNA, 20 bp, Artificial Sequence
  Synthetic sequence
ggaaatctattgaggctctg

SEQ ID NO: 291 - DNA, 43 bp, Artificial Sequence; identical to SEQ ID NO: 228
  Synthetic sequence

SEQ ID NO: 292 - DNA, 20 bp, Artificial Sequence
  Synthetic sequence
ttaaactctccatggaccag

SEQ ID NO: 293 - DNA, 43 bp, Artificial Sequence; identical to SEQ ID NO: 230
  Synthetic sequence

SEQ ID NO: 294 - DNA, 20 bp, Artificial Sequence
  Synthetic sequence
gcccatactggggaccaagg

SEQ ID NO: 295 - DNA, 43 bp, Artificial Sequence
  Synthetic sequence
agaaatccgtctttcattgacgggcccatactggggaccaagg

SEQ ID NO: 296 - DNA, 20 bp, Artificial Sequence
  Synthetic sequence
gccgtaacccttcgtgggta

SEQ ID NO: 297 - DNA, 43 bp, Artificial Sequence
  Synthetic sequence
agaaatccgtctttcattgacgggccgtaacccttcgtgggta

SEQ ID NO: 298 - DNA, 20 bp, Artificial Sequence
  Synthetic sequence
agctctcgtgggggtgggtc

SEQ ID NO: 299 - DNA, 43 bp, Artificial Sequence
  Synthetic sequence
agaaatccgtctttcattgacggagctctcgtgggggtgggtc

SEQ ID NO: 300 - DNA, 20 bp, Artificial Sequence
  Synthetic sequence
tgtccccccaagatttggat

SEQ ID NO: 301 - DNA, 20 bp, Artificial Sequence
  Synthetic sequence
tgtcccccaaacttttggac

SEQ ID NO: 302 - DNA, 20 bp, Artificial Sequence
  Synthetic sequence
tgtctccgccaagttttgga

SEQ ID NO: 303 - DNA, 20 bp, Artificial Sequence
  Synthetic sequence
gtcccccaaagcttttggac

SEQ ID NO: 304 - DNA, 20 bp, Artificial Sequence
  Synthetic sequence
tgtccccagaagttttggaa

SEQ ID NO: 305 - DNA, 20 bp, Artificial Sequence
  Synthetic sequence
agtccccccaagtcctggac

SEQ ID NO: 306 - DNA, 20 bp, Artificial Sequence
  Synthetic sequence
tgtctccaccaagttttggc

SEQ ID NO: 307 - DNA, 20 bp, Artificial Sequence
  Synthetic sequence
tgtccccccaagtgttgaaa

SEQ ID NO: 308 - DNA, 20 bp, Artificial Sequence
  Synthetic sequence
ggaggggtgagggagttggg

SEQ ID NO: 309 - DNA, 20 bp, Artificial Sequence
  Synthetic sequence
ggagtggtgagggacttgag

SEQ ID NO: 310 - DNA, 20 bp, Artificial Sequence
  Synthetic sequence
ggagaggatggggacttggg

SEQ ID NO: 311 - DNA, 20 bp, Artificial Sequence
  Synthetic sequence
gagaggtgagggacttgggg

SEQ ID NO: 312 - DNA, 20 bp, Artificial Sequence
  Synthetic sequence
ggagaggtgggggtgttggg

SEQ ID NO: 313 - DNA, 20 bp, Artificial Sequence
  Synthetic sequence
gggaggctgaggcacttggg

SEQ ID NO: 314 - DNA, 20 bp, Artificial Sequence
  Synthetic sequence
ggagaggggaaggatttggg

SEQ ID NO: 315 - DNA, 20 bp, Artificial Sequence
  Synthetic sequence
ggagaggagagggtacttgg

SEQ ID NO: 316 - DNA, 20 bp, Artificial Sequence
  Synthetic sequence
tgagaatggtgcgtcctagg

SEQ ID NO: 317 - DNA, 20 bp, Artificial Sequence
  Synthetic sequence
gtgagaatggtgtgtcttac

SEQ ID NO: 318 - DNA, 20 bp, Artificial Sequence
  Synthetic sequence
ctgagaatggtggtctctag

SEQ ID NO: 319 - DNA, 20 bp, Artificial Sequence
  Synthetic sequence
gtgtgaatggtgcttcctgg

SEQ ID NO: 320 - DNA, 20 bp, Artificial Sequence
  Synthetic sequence
gtgggaatggcgcctcctag

SEQ ID NO: 321 - DNA, 20 bp, Artificial Sequence
  Synthetic sequence
ctgagaatggtgctttctag

SEQ ID NO: 322 - DNA, 20 bp, Artificial Sequence
  Synthetic sequence
gatgaaatggtgcttcctag

SEQ ID NO: 323 - DNA, 20 bp, Artificial Sequence
  Synthetic sequence
gtgagaatggttctgtctag

SEQ ID NO: 324 - DNA, 20 bp, Artificial Sequence
  Synthetic sequence
gggttgtccagaaaaacggt

SEQ ID NO: 325 - DNA, 20 bp, Artificial Sequence
  Synthetic sequence
gagggttgtccagaaaaagg

SEQ ID NO: 326 - DNA, 20 bp, Artificial Sequence
  Synthetic sequence
ggggtgctccagaaaaacgt

SEQ ID NO: 327 - DNA, 20 bp, Artificial Sequence
  Synthetic sequence
gggttctccagaaaaacgga

SEQ ID NO: 328 - DNA, 20 bp, Artificial Sequence
  Synthetic sequence
gggtgttgcccagaaaaagg

SEQ ID NO: 329 - DNA, 20 bp, Artificial Sequence
  Synthetic sequence
ggtgttgtccagaaagacgt

SEQ ID NO: 330 - DNA, 20 bp, Artificial Sequence
  Synthetic sequence
agggttgtcccagaaaaagg

SEQ ID NO: 331 - DNA, 20 bp, Artificial Sequence
  Synthetic sequence
tgggttgtatagaaaaacgg

SEQ ID NO: 332 - DNA, 20 bp, Artificial Sequence
  Synthetic sequence
actggccctggctttggcag

SEQ ID NO: 333 - DNA, 20 bp, Artificial Sequence
  Synthetic sequence
aactggccctggctctggcc

SEQ ID NO: 334 - DNA, 20 bp, Artificial Sequence
  Synthetic sequence
caatgcccctggctttggca

SEQ ID NO: 335 - DNA, 20 bp, Artificial Sequence
  Synthetic sequence
aaactggccctggctctggc

SEQ ID NO: 336 - DNA, 20 bp, Artificial Sequence
  Synthetic sequence
actgaccctggcttatggca

SEQ ID NO: 337 - DNA, 20 bp, Artificial Sequence
  Synthetic sequence
ccctggctctggctttggca

SEQ ID NO: 338 - DNA, 20 bp, Artificial Sequence
  Synthetic sequence
aatggccactggatttggca

SEQ ID NO: 339 - DNA, 20 bp, Artificial Sequence
  Synthetic sequence
aactgtccctgggctttgca

SEQ ID NO: 340 - DNA, 20 bp, Artificial Sequence
  Synthetic sequence
tagcctctcccgctctggtt

SEQ ID NO: 341 - DNA, 20 bp, Artificial Sequence
  Synthetic sequence
gcagccactccctctctggt

SEQ ID NO: 342 - DNA, 20 bp, Artificial Sequence
  Synthetic sequence
gtagactctctctctctggt

SEQ ID NO: 343 - DNA, 20 bp, Artificial Sequence
  Synthetic sequence
agtgcctctcctgctctggt

SEQ ID NO: 344 - DNA, 20 bp, Artificial Sequence
  Synthetic sequence
gttagcctctccctctctgt

SEQ ID NO: 345 - DNA, 20 bp, Artificial Sequence
  Synthetic sequence
gagttctctcccgctctggt

SEQ ID NO: 346 - DNA, 20 bp, Artificial Sequence
  Synthetic sequence
tagcctcacctcgctctggt

SEQ ID NO: 347 - DNA, 20 bp, Artificial Sequence
  Synthetic sequence
gtagtcctctccctctctgg

SEQ ID NO: 348 - DNA, 20 bp, Artificial Sequence
  Synthetic sequence
gggcagtggttggtgagcat

SEQ ID NO: 349 - DNA, 20 bp, Artificial Sequence
  Synthetic sequence
gggagtggttggtcatgcat

SEQ ID NO: 350 - DNA, 20 bp, Artificial Sequence
  Synthetic sequence
ggtaagtgcttggtcagcat

SEQ ID NO: 351 - DNA, 20 bp, Artificial Sequence
  Synthetic sequence
ggaagtggttggtcagcatg

SEQ ID NO: 352 - DNA, 20 bp, Artificial Sequence
  Synthetic sequence
gggaaatggtttgtcagcag

SEQ ID NO: 353 - DNA, 20 bp, Artificial Sequence
  Synthetic sequence
gggaagtgattaggtcacat

SEQ ID NO: 354 - DNA, 20 bp, Artificial Sequence
  Synthetic sequence
gggaagtttttggtcatcat

SEQ ID NO: 355 - DNA, 20 bp, Artificial Sequence
  Synthetic sequence
ggaaagttgttgggcagcat

SEQ ID NO: 356 - DNA, 20 bp, Artificial Sequence
  Synthetic sequence
agcgggtagggaagggtctt

SEQ ID NO: 357 - DNA, 20 bp, Artificial Sequence
  Synthetic sequence
gcgggtatgggaagggcttt

SEQ ID NO: 358 - DNA, 20 bp, Artificial Sequence
  Synthetic sequence
acgcaggatgggaagggctt

SEQ ID NO: 359 - DNA, 20 bp, Artificial Sequence
  Synthetic sequence
agcggctatggggaggcctt

SEQ ID NO: 360 - DNA, 20 bp, Artificial Sequence
  Synthetic sequence
agtaggtatgggaagggcct

SEQ ID NO: 361 - DNA, 20 bp, Artificial Sequence
  Synthetic sequence
agagggtatgggaatggcta

SEQ ID NO: 362 - DNA, 20 bp, Artificial Sequence
  Synthetic sequence
agcaggtgagggaagggctt

SEQ ID NO: 363 - DNA, 20 bp, Artificial Sequence
  Synthetic sequence
agtgggtctgggtagggctt

SEQ ID NO: 364 - DNA, 20 bp, Artificial Sequence
  Synthetic sequence
ggcgcagggccacctggacc

SEQ ID NO: 365 - DNA, 20 bp, Artificial Sequence
  Synthetic sequence
ggggcagggccacctgtagc

SEQ ID NO: 366 - DNA, 20 bp, Artificial Sequence
  Synthetic sequence
gtgcccagggccacccggac

SEQ ID NO: 367 - DNA, 20 bp, Artificial Sequence
  Synthetic sequence
gttgcgcagggccactggac

SEQ ID NO: 368 - DNA, 20 bp, Artificial Sequence
  Synthetic sequence
gggcgtggggcaacctggac

SEQ ID NO: 369 - DNA, 20 bp, Artificial Sequence
  Synthetic sequence
ggcgcagggcacaccgggac

SEQ ID NO: 370 - DNA, 20 bp, Artificial Sequence
  Synthetic sequence
gggcacaggggccacctgga

SEQ ID NO: 371 - DNA, 20 bp, Artificial Sequence
  Synthetic sequence
aggcacagggccacttggac

SEQ ID NO: 372 - DNA, 20 bp, Artificial Sequence
  Synthetic sequence
gatggcgacttcaggcacag

SEQ ID NO: 373 - DNA, 20 bp, Artificial Sequence
  Synthetic sequence
gataggcgatttcaggcaca

SEQ ID NO: 374 - DNA, 20 bp, Artificial Sequence
  Synthetic sequence
ggatggcgactgtaaggcaa

SEQ ID NO: 375 - DNA, 20 bp, Artificial Sequence
  Synthetic sequence
ggatggcgaatacaggaaca

SEQ ID NO: 376 - DNA, 20 bp, Artificial Sequence
  Synthetic sequence
gcagggcgacttcagacaca

SEQ ID NO: 377 - DNA, 20 bp, Artificial Sequence
  Synthetic sequence
ggatggcgaattcagtcact

SEQ ID NO: 378 - DNA, 20 bp, Artificial Sequence
  Synthetic sequence
tgatggagaaatcaggcaca

SEQ ID NO: 379 - DNA, 20 bp, Artificial Sequence
  Synthetic sequence
ggatggggcctccaggctca

SEQ ID NO: 380 - DNA, 20 bp, Artificial Sequence
  Synthetic sequence
atgtgacttgagcccaaagg

SEQ ID NO: 381 - DNA, 20 bp, Artificial Sequence
  Synthetic sequence
atgtgatttttgcccaaagg

SEQ ID NO: 382 - DNA, 20 bp, Artificial Sequence
  Synthetic sequence
tgtgattgatgcccaaaggt

SEQ ID NO: 383 - DNA, 20 bp, Artificial Sequence
  Synthetic sequence
atgtaattatgccccaaagg

SEQ ID NO: 384 - DNA, 20 bp, Artificial Sequence
  Synthetic sequence
atgtgattgttgaccaaatg

SEQ ID NO: 385 - DNA, 20 bp, Artificial Sequence
  Synthetic sequence
ctgtgatagaagcccaaagg

SEQ ID NO: 386 - DNA, 20 bp, Artificial Sequence
  Synthetic sequence
atatgatagatgcccaaatg

SEQ ID NO: 387 - DNA, 20 bp, Artificial Sequence
  Synthetic sequence
atttgatggaagcccaaagg

SEQ ID NO: 388 - DNA, 20 bp, Artificial Sequence
  Synthetic sequence
gtggagtcctggagtcatgg

SEQ ID NO: 389 - DNA, 20 bp, Artificial Sequence
  Synthetic sequence
gggaggcctggagtcatggc

SEQ ID NO: 390 - DNA, 20 bp, Artificial Sequence
  Synthetic sequence
gtgggaggcctggagcatgg

SEQ ID NO: 391 - DNA, 20 bp, Artificial Sequence
  Synthetic sequence
ggggagggttggagtcatgg

SEQ ID NO: 392 - DNA, 20 bp, Artificial Sequence
  Synthetic sequence
ggggaggcctggagatgatg

SEQ ID NO: 393 - DNA, 20 bp, Artificial Sequence
  Synthetic sequence
gggaggcctcagagtcatgg

SEQ ID NO: 394 - DNA, 20 bp, Artificial Sequence
  Synthetic sequence
gggaggccttggaatcatgg

SEQ ID NO: 395 - DNA, 20 bp, Artificial Sequence
  Synthetic sequence
gtggagtgcctggagcatgg

SEQ ID NO: 396 - DNA, 20 bp, Artificial Sequence
  Synthetic sequence
ttattattcccatgggaagg

SEQ ID NO: 397 - DNA, 20 bp, Artificial Sequence
  Synthetic sequence
tattattcccatattgaagg

SEQ ID NO: 398 - DNA, 20 bp, Artificial Sequence
  Synthetic sequence
attattcccatagggaaggg

SEQ ID NO: 399 - DNA, 20 bp, Artificial Sequence
  Synthetic sequence
tattaatcctatagggaagg

SEQ ID NO: 400 - DNA, 20 bp, Artificial Sequence
  Synthetic sequence
tattatgcccatagagaaga

SEQ ID NO: 401 - DNA, 20 bp, Artificial Sequence
  Synthetic sequence
tattattctcaaaggggagg

SEQ ID NO: 402 - DNA, 20 bp, Artificial Sequence
  Synthetic sequence
tatttttcccatagtgaaga

SEQ ID NO: 403 - DNA, 20 bp, Artificial Sequence
  Synthetic sequence
tattgttctcatagagaagg

SEQ ID NO: 404 - DNA, 20 bp, Artificial Sequence
  Synthetic sequence
agccagtgttgctagtcaag

SEQ ID NO: 405 - DNA, 20 bp, Artificial Sequence
  Synthetic sequence
gtagccgtgttgctagtgaa

SEQ ID NO: 406 - DNA, 20 bp, Artificial Sequence
  Synthetic sequence
gagccactgttggtactcaa

SEQ ID NO: 407 - DNA, 20 bp, Artificial Sequence
  Synthetic sequence
gaggcagtgttgcatagcaa

SEQ ID NO: 408 - DNA, 20 bp, Artificial Sequence
  Synthetic sequence
gagacagtgtggcaagtcaa

SEQ ID NO: 409 - DNA, 20 bp, Artificial Sequence
  Synthetic sequence
cagccattgttgctaggcaa

SEQ ID NO: 410 - DNA, 20 bp, Artificial Sequence
  Synthetic sequence
tgccagtgttgctaagtcaa

SEQ ID NO: 411 - DNA, 20 bp, Artificial Sequence
  Synthetic sequence
gagccactgttgaaagtcaa

SEQ ID NO: 412 - DNA, 20 bp, Artificial Sequence
  Synthetic sequence
agccagggacttttcagggc

SEQ ID NO: 413 - DNA, 20 bp, Artificial Sequence
  Synthetic sequence
tgcaggggactattcagaga

SEQ ID NO: 414 - DNA, 20 bp, Artificial Sequence
  Synthetic sequence
agccagggacttttcagggc

SEQ ID NO: 415 - DNA, 20 bp, Artificial Sequence
  Synthetic sequence
atcaaggcacaattcaggga

SEQ ID NO: 416 - DNA, 20 bp, Artificial Sequence
  Synthetic sequence
aggaagggactcttcagaga

SEQ ID NO: 417 - DNA, 20 bp, Artificial Sequence
  Synthetic sequence
agcaagggcctttccaggga

SEQ ID NO: 418 - DNA, 20 bp, Artificial Sequence
  Synthetic sequence
agcaagtgatattcaggaga

SEQ ID NO: 419 - DNA, 20 bp, Artificial Sequence
  Synthetic sequence
agcaggggacattccaggga

SEQ ID NO: 420 - DNA, 20 bp, Artificial Sequence
  Synthetic sequence
aaattgagcaatctaccctg

SEQ ID NO: 421 - DNA, 20 bp, Artificial Sequence
  Synthetic sequence
aactattgagcaatctccct

SEQ ID NO: 422 - DNA, 20 bp, Artificial Sequence
  Synthetic sequence
aaaattgagtaattttccct

SEQ ID NO: 423 - DNA, 20 bp, Artificial Sequence
  Synthetic sequence
aaaattgaccaattctaccc

SEQ ID NO: 424 - DNA, 20 bp, Artificial Sequence
  Synthetic sequence
acagttgagcattctaccct

SEQ ID NO: 425 - DNA, 20 bp, Artificial Sequence
  Synthetic sequence
aaagttagcaactctaccct

SEQ ID NO: 426 - DNA, 20 bp, Artificial Sequence
  Synthetic sequence
aaaaataagcaatctgccct

SEQ ID NO: 427 - DNA, 20 bp, Artificial Sequence
  Synthetic sequence
aataattggcaatctactct

SEQ ID NO: 428 - DNA, 20 bp, Artificial Sequence
  Synthetic sequence
gggggtgaccgccggagcgc

SEQ ID NO: 429 - DNA, 20 bp, Artificial Sequence
  Synthetic sequence
tgggggagccgcccggagcg

SEQ ID NO: 430 - DNA, 20 bp, Artificial Sequence
  Synthetic sequence
tggaggtgaccgcctgggcg

SEQ ID NO: 431 - DNA, 20 bp, Artificial Sequence
  Synthetic sequence
tgggggtgacagctggtgcg

SEQ ID NO: 432 - DNA, 20 bp, Artificial Sequence
  Synthetic sequence
tgggggtggcagctggaccg

SEQ ID NO: 433 - DNA, 20 bp, Artificial Sequence
  Synthetic sequence
tgcgggtgtccgcctggacg

SEQ ID NO: 434 - DNA, 20 bp, Artificial Sequence
  Synthetic sequence
ttggggtgacagccggcggg

SEQ ID NO: 435 - DNA, 20 bp, Artificial Sequence
  Synthetic sequence
ttggggtgaccacaggagca

SEQ ID NO: 436 - DNA, 20 bp, Artificial Sequence
  Synthetic sequence
atcctccaccagtcatggtg

SEQ ID NO: 437 - DNA, 20 bp, Artificial Sequence
  Synthetic sequence
aatcctcccacagtcctggt

SEQ ID NO: 438 - DNA, 20 bp, Artificial Sequence
  Synthetic sequence
atccatccaccagccatggt

SEQ ID NO: 439 - DNA, 20 bp, Artificial Sequence
  Synthetic sequence
aatcctccaacagccctggt

SEQ ID NO: 440 - DNA, 20 bp, Artificial Sequence
  Synthetic sequence
aatcttccacacagtctggt

SEQ ID NO: 441 - DNA, 20 bp, Artificial Sequence
  Synthetic sequence
aatcctccacctgtcttggc

SEQ ID NO: 442 - DNA, 20 bp, Artificial Sequence
  Synthetic sequence
aatccatccaccattcatgg

SEQ ID NO: 443 - DNA, 20 bp, Artificial Sequence
  Synthetic sequence
aagtcctcaccagtcattgt

SEQ ID NO: 444 - DNA, 20 bp, Artificial Sequence
  Synthetic sequence
ttgacattgtccacacctgg

SEQ ID NO: 445 - DNA, 20 bp, Artificial Sequence
  Synthetic sequence
gttgacattgaccacagctg

SEQ ID NO: 446 - DNA, 20 bp, Artificial Sequence
  Synthetic sequence
gttgacatgtccagcagctg

SEQ ID NO: 447 - DNA, 20 bp, Artificial Sequence
  Synthetic sequence
gtgacacttatccacacctg

SEQ ID NO: 448 - DNA, 20 bp, Artificial Sequence
  Synthetic sequence
gttgactattttccaacctg

SEQ ID NO: 449 - DNA, 20 bp, Artificial Sequence
  Synthetic sequence
tttaacattttccacacctg

SEQ ID NO: 450 - DNA, 20 bp, Artificial Sequence
  Synthetic sequence
gttgacattgcccagatctg

SEQ ID NO: 451 - DNA, 20 bp, Artificial Sequence
  Synthetic sequence
gaaaacattgtccacacctg

SEQ ID NO: 452 - DNA, 20 bp, Artificial Sequence
  Synthetic sequence
tgaaatctagtgaggctctg

SEQ ID NO: 453 - DNA, 20 bp, Artificial Sequence
  Synthetic sequence
ggaaatccagtgaggctctg

SEQ ID NO: 454 - DNA, 20 bp, Artificial Sequence
  Synthetic sequence
tgaaatctagtgaggctctg

SEQ ID NO: 455 - DNA, 20 bp, Artificial Sequence
  Synthetic sequence
gaaatctattgaggctctgg

SEQ ID NO: 456 - DNA, 20 bp, Artificial Sequence
  Synthetic sequence
aaaaatctattgaggctgtg

SEQ ID NO: 457 - DNA, 20 bp, Artificial Sequence
  Synthetic sequence
ggatatctattagtgctctg

SEQ ID NO: 458 - DNA, 20 bp, Artificial Sequence
  Synthetic sequence
ggaaatatttagaggctctg

SEQ ID NO: 459 - DNA, 20 bp, Artificial Sequence
  Synthetic sequence
tgaaatctagtggggctctg

SEQ ID NO: 460 - DNA, 20 bp, Artificial Sequence
  Synthetic sequence
taaactctccatggaccagg

SEQ ID NO: 461 - DNA, 20 bp, Artificial Sequence
  Synthetic sequence
ttaaaatctccatgaccatg

SEQ ID NO: 462 - DNA, 20 bp, Artificial Sequence
  Synthetic sequence
ttaatctctccatggagcac

SEQ ID NO: 463 - DNA, 20 bp, Artificial Sequence
  Synthetic sequence
ttaaactctctcatggatca

SEQ ID NO: 464 - DNA, 20 bp, Artificial Sequence
  Synthetic sequence
gttaaactctgcatggacag

SEQ ID NO: 465 - DNA, 20 bp, Artificial Sequence
  Synthetic sequence
gtaaactctcccttgaccag

SEQ ID NO: 466 - DNA, 20 bp, Artificial Sequence
  Synthetic sequence
ttaaatctccatgagacaag

SEQ ID NO: 467 - DNA, 20 bp, Artificial Sequence
  Synthetic sequence
ttaaactctacaggaccaag

SEQ ID NO: 468 - DNA, 20 bp, Artificial Sequence
  Synthetic sequence
gcccatgctggggaacaagg

SEQ ID NO: 469 - DNA, 20 bp, Artificial Sequence
  Synthetic sequence
cccatactggggaccaagga

SEQ ID NO: 470 - DNA, 20 bp, Artificial Sequence
  Synthetic sequence
gtccatactgggaaccaagg

SEQ ID NO: 471 - DNA, 20 bp, Artificial Sequence
  Synthetic sequence
gcccatgacaggggccaagg

SEQ ID NO: 472 - DNA, 20 bp, Artificial Sequence
  Synthetic sequence
ccacagactggggaccaagg

SEQ ID NO: 473 - DNA, 20 bp, Artificial Sequence
  Synthetic sequence
gcccatactcggggacctgg

SEQ ID NO: 474 - DNA, 20 bp, Artificial Sequence
  Synthetic sequence
tcccatagtggagaccaagg

SEQ ID NO: 475 - DNA, 20 bp, Artificial Sequence
  Synthetic sequence
taccatactggggacccagg

SEQ ID NO: 476 - DNA, 20 bp, Artificial Sequence
  Synthetic sequence
ccgtaacccttcgtgggtag

SEQ ID NO: 477 - DNA, 20 bp, Artificial Sequence
  Synthetic sequence
gctgtaatccctcgtgggta

SEQ ID NO: 478 - DNA, 20 bp, Artificial Sequence
  Synthetic sequence
gcctaaccctgttgtgggta

SEQ ID NO: 479 - DNA, 20 bp, Artificial Sequence
  Synthetic sequence
gcctaaccctatcgtggtta

SEQ ID NO: 480 - DNA, 20 bp, Artificial Sequence
  Synthetic sequence
gacggaatccttcgtgagta

SEQ ID NO: 481 - DNA, 20 bp, Artificial Sequence
  Synthetic sequence
gccgtaagcccttcgaggtc

SEQ ID NO: 482 - DNA, 20 bp, Artificial Sequence
  Synthetic sequence
gcgcaaaacccttcgtgggt

SEQ ID NO: 483 - DNA, 20 bp, Artificial Sequence
  Synthetic sequence
gccataaccctacggggtga

SEQ ID NO: 484 - DNA, 20 bp, Artificial Sequence
  Synthetic sequence
gctctcgtgggggtgggtca

SEQ ID NO: 485 - DNA, 20 bp, Artificial Sequence
  Synthetic sequence
agctctgtgggggtgggatc

SEQ ID NO: 486 - DNA, 20 bp, Artificial Sequence
  Synthetic sequence
ggctctcatgggggtgtgtc

SEQ ID NO: 487 - DNA, 20 bp, Artificial Sequence
  Synthetic sequence
agcctggtgggggtgaggtc

SEQ ID NO: 488 - DNA, 20 bp, Artificial Sequence
  Synthetic sequence
aggctccgtgggtgtgggtc

SEQ ID NO: 489 - DNA, 20 bp, Artificial Sequence
  Synthetic sequence
agctctgtgggggtgagggc

SEQ ID NO: 490 - DNA, 20 bp, Artificial Sequence
  Synthetic sequence
ggctctgtgggggtgggatc

SEQ ID NO: 491 - DNA, 20 bp, Artificial Sequence
  Synthetic sequence
agctctcggggggtgtgggc

SEQ ID NO: 492 - RNA, 23 nt, Artificial Sequence
  Synthetic Construct
agaaauccgucuuucauugacgg

SEQ ID NO: 493 - RNA, 36 nt, Artificial Sequence
  Synthetic Construct
guugcaaaacccaagaaauccgucuuucauugacgg

SEQ ID NO: 494 - RNA, 34 nt, Artificial Sequence
  Synthetic Construct
gcaacaccuaagaaauccgucuuucauugacggg

SEQ ID NO: 495 - protein, 1054 aa, Artificial Sequence
  Synthetic Construct
MSSAIKSYKSVLRPNERKNQLLKSTIQCLEDGSAFFFKMLQGLFGGITPEIVRFSTEQEKQQQDIALWCAVNWFRPVSQDSLTHTIASDNLVEKFEEYYGGTASDAIKQYFSASIGESYYWNDCRQQYYDLCRELGVEVSDLTHDLEILCREKCLAVATESNQNNSIISVLFGTGEKEDRSVKLRITKKILEAISNLKEIPKNVAPIQEIILNVAKATKETFRQVYAGNLGAPSTLEKFIAKDGQKEFDLKKLQTDLKKVIRGKSKERDWCCQEELRSYVEQNTIQYDLWAWGEMFNKAHTALKIKSTRNYNFAKQRLEQFKEIQSLNNLLVVKKLNDFFDSEFFSGEETYTICVHHLGGKDLSKLYKAWEDDPADPENAIVVLCDDLKNNFKKEPIRNILRYIFTIRQECSAQDILAAAKYNQQLDRYKSQKANPSVLGNQGFTWTNAVILPEKAQRNDRPNSLDLRIWLYLKLRHPDGRWKKHHIPFYDTRFFQEIYAAGNSPVDTCQFRTPRFGYHLPKLTDQTAIRVNKKHVKAAKTEARIRLAIQQGTLPVSNLKITEISATINSKGQVRIPVKFRVGRQKGTLQIGDRFCGYDQNQTASHAYSLWEVVKEGQYHKELRCRVRFISSGDIVSITENRGNQFDQLSYEGLAYPQYADWRKKASKFVSLWQITKKNKKKEIVTVEAKEKFDAICKYQPRLYKFNKEYAYLLRDIVRGKSLVELQQIRQEIFRFIEQDCGVTRLGSLSLSTLETVKAVKGIIYSYFSTALNASKNNPISDEQRKEFDPELFALLEKLELIRTRKKKQKVERIANSLIQTCLENNIKFIRGEGDLSTTNNATKKKANSRSMDWLARGVFNKIRQLAPMHNITLFGCGSLYTSHQDPLVHRNPDKAMKCRWAAIPVKDIGDWVLRKLSQNLRAKNRGTGEYYHQGVKEFLSHYELQDLEEELLKWRSDRKSNIPCWVLQNRLAEKLGNKEAVVYIPVRGGRIYFATHKVATGAVSIVFDQKQVWVCNADHVAAANIALTGKGIGRQSSDEENPDGGRIKLQLTS

SEQ ID NO: 496 - protein, 1054 aa, Artificial Sequence
  Synthetic Construct
MSSAIKSYKSVLRPNERKNQLLKSTIQCLEDGSAFFFKMLQGLFGGITPEIVRFSTEQEKQQQDIALWCAVNWFRPVSQDSLTHTIASDNLVEKFEEYYGGTASDAIKQYFSASIGESYYWNDCRQQYYDLCRELGVEVSDLTHDLEILCREKCLAVATESNQNNSIISVLFGTGEKEDRSVKLRITKKILEAISNLKEIPKNVAPIQEIILNVAKATKETFRQVYAGNLGAPSTLEKFIAKDGQKEFDLKKLQTDLKKVIRGKSKERDWCCQEELRSYVEQNTIQYDLWAWGEMFNKAHTALKIKSTRNYNFAKQRLEQFKEIQSLNNLLVVKKLNDFFDSEFFSGEETYTICVHHLGGKDLSKLYKAWEDDPADPENAIVVLCDDLKNNFKKEPIRNILRYIFTIRQECSAQDILAAAKYNQQLDRYKSQKANPSVLGNQGFTWTNAVILPEKAQRNDRPNSLDLRIWLYLKLRHPDGRWKKHHIPFYDTRFFQEIYAAGNSPVDTCQFRTPRFGYHLPKLTDQTAIRVNKKHVKAAKTEARIRLAIQQGTLPVSNLKITEISATINSKGQVRIPVKFRVGRQKGTLQIGDRFCGYDQNQTASHAYSLWEVVKEGQYHKELRCRVRFISSGDIVSITENRGNQFDQLSYEGLAYPQYADWRKKASKFVSLWQITKKNKKKEIVTVEAKEKFDAICKYQPRLYKFNKEYAYLLRDIVRGKSLVELQQIRQEIFRFIEQDCGVTRLGSLSLSTLETVKAVKGIIYSYFSTALNASKNNPISDEQRKEFDPELFALLEKLELIRTRKKKQKVERIANSLIQTCLENNIKFIRGEGDLSTTNNATKKKANSRSMDWLARGVFNKIRQLATMHNITLFGCGSLYTSHQDPLVHRNPDKAMKCRWAAIPVKDIGDWVLRKLSQNLRAKNRGTGEYYHQGVKEFLSHYELQDLEEELLKWRSDRKSNIPCWVLQNRLAEKLGNKEAVVYIPVRGGRIYFATHKVATGAVSIVFDQKQVWVCNADHVAAANIALTGKGIGRQSSDEENPDGGRIKLQLTS

SEQ ID NO: 497 - protein, 1054 aa, Artificial Sequence
  Synthetic Construct
MSSAIKSYKSVLRPNERKNQLLKSTIQCLEDGSAFFFKMLQGLFGGITPEIVRFSTEQEKQQQDIALWCAVNWFRPVSQDSLTHTIASDNLVEKFEEYYGGTASDAIKQYFSASIGESYYWNDCRQQYYDLCRELGVEVSDLTHDLEILCREKCLAVATESNQNNSIISVLFGTGEKEDRSVKLRITKKILEAISNLKEIPKNVAPIQEIILNVAKATKETFRQVYAGNLGAPSTLEKFIAKDGQKEFDLKKLQTDLKKVIRGKSKERDWCCQEELRSYVEQNTIQYDLWAWGEMFNKAHTALKIKSTRNYNFAKQRLEQFKEIQSLNNLLVVKKLNDFFDSEFFSGEETYTICVHHLGGKDLSKLYKAWEDDPADPENAIVVLCDDLKNNFKKEPIRNILRYIFTIRQECSAQDILAAAKYNQQLDRYKSQKANPSVLGNQGFTWTNAVILPEKAQRNDRPNSLDLRIWLYLKLRHPDGRWKKHHIPFYDTRFFQEIYAAGNSPVDTCQFRTPRFGYHLPKLTDQTAIRVNKKHVKAAKTEARIRLAIQQGTLPVSNLKITEISATINSKGQVRIPVKFKVGRQKRTLQIGDRFCGYDQNQTASHAYSLWEVVKEGQYHKELGCRVRFISSGDIVSITENRGNQFDQLSYEGLAYPQYADWRKKASKFVSLWQITKKNKKKEIVTVEAKEKFDAICKYQPRLYKFNKEYAYLLRDIVRGKSLVELQQIRQEIFRFIEQDCGVTRLGSLSLSTLETVKAVKGIIYSYFSTALNASKNNPISDEQRKEFDPELFALLEKLELIRTRKKKQKVERIANSLIQTCLENNIKFIRGEGDLSTTNNATKKKANSRSMDWLARGVFNKIRQLAPMHNITLFGCGSLYTSHQDPLVHRNPDKAMKCRWAAIPVKDIGDWVLRKLSQNLRAKNRGTGEYYHQGVKEFLSHYELQDLEEELLKWRSDRKSNIPCWVLQNRLAEKLGNKEAVVYIPVRGGRIYFATHKVATGAVSIVFDQKQVWVCNADHVAAANIALTGKGIGEQSSDEENPDGGRIKLQLTS

SEQ ID NO: 498 - protein, 1054 aa, Artificial Sequence
  Synthetic Construct
MSSAIKSYKSVLRPNERKNQLLKSTIQCLEDGSAFFFKMLQGLFGGITPEIVRFSTEQEKQQQDIALWCAVNWFRPVSQDSLTHTIASDNLVEKFEEYYGGTASDAIKQYFSASIGESYYWNDCRQQYYDLCRELGVEVSDLTHDLEILCREKCLAVATESNQNNSIISVLFGTGEKEDRSVKLRITKKILEAISNLKEIPKNVAPIQEIILNVAKATKETFRQVYAGNLGAPSTLEKFIAKDGQKEFDLKKLQTDLKKVIRGKSKERDWCCQEELRSYVEQNTIQYDLWAWGEMFNKAHTALKIKSTRNYNFAKQRLEQFKEIQSLNNLLVVKKLNDFFDSEFFSGEETYTICVHHLGGKDLSKLYKAWEDDPADPENAIVVLCDDLKNNFKKEPIRNILRYIFTIRQECSAQDILAAAKYNQQLDRYKSQKANPSVLGNQGFTWTNAVILPEKAQRNDRPNSLDLRIWLYLKLRHPDGRWKKHHIPFYDTRFFQEIYAAGNSPVDTCQFRTPRFGYHLPKLTDQTAIRVNKKHVKAAKTEARIRLAIQQGTLPVSNLKITEISATINSKGQVRIPVKFKVGRQKRTLQIGDRFCGYDQNQTASHAYSLWEVVKEGQYHKELRCFVRFISSGDIVSITENRGNQFDQLSYEGLAYPQYADWRKKASKFVSLWQITKKNKKKEIVTVEAKEKFDAICKYQPRLYKFNKEYAYLLRDIVRGKSLVELQQIRQEIFRFIEQDCGVTRLGSLSLSTLETVKAVKGIIYSYFSTALNASKNNPISDEQRKEFDPELFALLEKLELIRTRKKKQKVERIANSLIQTCLENNIKFIRGEGDLSTTNNATKKKANSRSMDWLARGVFNKIRQLAPMHNITLFGCGSLYTSHQDPLVHRNPDKAMKCRWAAIPVKDIGDWVLRKLSQNLRAKNRGTGEYYHQGVKEFLSHYELQDLEEELLKWRSDRKSNIPCWVLQNRLAEKLGNKEAVVYIPVRGGRIYFATHKVATGAVSIVFDQKQVWVCNADHVAAANIALTGKGIGEQSSDEENPDGGRIKLQLTS

SEQ ID NO: 499 - protein, 1054 aa, Artificial Sequence
  Synthetic Construct
MSSAIKSYKSVLRPNERKNQLLKSTIQCLEDGSAFFFKMLQGLFGGITPEIVRFSTEQEKQQQDIALWCAVNWFRPVSQDSLTHTIASDNLVEKFEEYYGGTASDAIKQYFSASIGESYYWNDCRQQYYDLCRELGVEVSDLTHDLEILCREKCLAVATESNQNNSIISVLFGTGEKEDRSVKLRITKKILEAISNLKEIPKNVAPIQEIILNVAKATKETFRQVYAGNLGAPSTLEKFIAKDGQKEFDLKKLQTDLKKVIRGKSKERDWCCQEELRSYVEQNTIQYDLWAWGEMFNKAHTALKIKSTRNYNFAKQRLEQFKEIQSLNNLLVVKKLNDFFDSEFFSGEETYTICVHHLGGKDLSKLYKAWEDDPADPENAIVVLCDDLKNNFKKEPIRNILRYIFTIRQECSAQDILAAAKYNQQLDRYKSQKANPSVLGNQGFTWTNAVILPEKAQRNDRPNSLDLRIWLYLKLRHPDGRWKKHHIPFYDTRFFQEIYAAGNSPVDTCQFRTPRFGYHLPKLTDQTAIRVNKKHVKAAKTEARIRLAIQQGTLPVSNLKITEISATINSKGQVRIPVKFRVGRQKRTLQIGDRFCGYDQNQTASHAYSLWEVVKEGQYHKELRCRVRFISSGDIVSITENRGNQFDQLSYEGLAYPQYADWRKKASKFVSLWQITKKNKKKEIVTVEAKEKFDAICKYQPRLYKFNKEYAYLLRDIVRGKSLVELQQIRQEIFRFIEQDCGVTRLGSLSLSTLETVKAVKGIIYSYFSTALNASKNNPISDEQRKEFDPELFALLEKLELIRTRKKKQKVERIANSLIQTCLENNIKFIRGEGDLSTTNNATKKKANSRSMDWLARGVFNKIRQLAPMHNITLFGCGSLYTSHQDPLVHRNPDKAMKCRWAAIPVKDIGDWVLRKLSQNLRAKNRGTGEYYHQGVKEFLSHYELQDLEEELLKWRSDRKSNIPCWVLQNRLAEKLGNKEAVVYIPVRGGRIYFATHKVATGAVSIVFDQKQVWVCNADHVAAANIALTGKGIGEQSSDEENPDGGRIKLQLTS

SEQ ID NO: 500 - protein, 1054 aa, Artificial Sequence
  Synthetic Construct
MSSAIKSYKSVLRPNERKNQLLKSTIQCLEDGSAFFFKMLQGLFGGITPEIVRFSTEQEKQQQDIALWCAVNWFRPVSQDSLTHTIASDNLVEKFEEYYGGTASDAIKQYFSASIGESYYWNDCRQQYYDLCRELGVEVSDLTHDLEILCREKCLAVATESNQNNSIISVLFGTGEKEDRSVKLRITKKILEAISNLKEIPKNVAPIQEIILNVAKATKETFRQVYAGNLGAPSTLEKFIAKDGQKEFDLKKLQTDLKKVIRGKSKERDWCCQEELRSYVEQNTIQYDLWAWGEMFNKAHTALKIKSTRNYNFAKQRLEQFKEIQSLNNLLVVKKLNDFFDSEFFSGEETYTICVHHLGGKDLSKLYKAWEDDPADPENAIVVLCDDLKNNFKKEPIRNILRYIFTIRQECSAQDILAAAKYNQQLDRYKSQKANPSVLGNQGFTWTNAVILPEKAQRNDRPNSLDLRIWLYLKLRHPDGRWKKHHIPFYDTRFFQEIYAAGNSPVDTCQFRTPRFGYHLPKLTDQTAIRVNKKHVKAAKTEARIRLAIQQGTLPVSNLKITEISATINSKGQVRIPVKFRVGRQKRTLQIGDRFCGYDQNQTASHAYSLWEVVKEGQYHKELRCRVRFISSGDIVSITENRGNQFDQLSYEGLAYPQYADWRKKASKFVSLWQITKKNKKKEIVTVEAKEKFDAICKYQPRLYKFNKEYAYLLRDIVRGKSLVELQQIRQEIFRFIEQDCGVTRLGSLSLSTLETVKAVKGIIYSYFSTALNASKNNPISDEQRKEFDPELFALLEKLELIRTRKKKQKVERIANSLIQTCLENNIKFIRGEGDLSTTNNATKKKANSRSMDWLARGVFNKIRQLAPMHNITLFGCGSLYTSHQDPLVHRNPDKAMKCRWAAIPVKDIGDWVLRKLSQNLRAKNRGTGEYYHQGVKEFLSHYELQDLEEELLKWRSDRKSNIPCWKLQNRLAEKLGNKEAVVYIPVRGGRIYFATHKVATGAVSIVFDQKQVWVCNADHVAAANIALTGKGIGEQSSDEENPDGGRIKLQLTS

SEQ ID NO: 501 - protein, 1054 aa, Artificial Sequence
  Synthetic Construct
MSSAIKSYKSVLRPNERKNQLLKSTIQCLEDGSAFFFKMLQGLFGGITPEIVRFSTEQEKQQQDIALWCAVNWFRPVSQDSLTHTIASDNLVEKFEEYYGGTASDAIKQYFSASIGESYYWNDCRQQYYDLCRELGVEVSDLTHDLEILCREKCLAVATESNQNNSIISVLFGTGEKEDRSVKLRITKKILEAISNLKEIPKNVAPIQEIILNVAKATKETFRQVYAGNLGAPSTLEKFIAKDGQKEFDLKKLQTDLKKVIRGKSKERDWCCQEELRSYVEQNTIQYDLWAWGEMFNKAHTALKIKSTRNYNFAKQRLEQFKEIQSLNNLLVVKKLNDFFDSEFFSGEETYTICVHHLGGKDLSKLYKAWEDDPADPENAIVVLCDDLKNNFKKEPIRNILRYIFTIRQECSAQDILAAAKYNQQLDRYKSQKANPSVLGNQGFTWTNAVILPEKAQRNDRPNSLDLRIWLYLKLRHPDGRWKKHHIPFYDTRFFQEIYAAGNSPVDTCQFRTPRFGYHLPKLTDQTAIRVNKKHVKAAKTEARIRLAIQQGTLPVSNLKITEISATINSKGQVRIPVKFRVGRQKGTLQIGDRFCGYDQNQTASHAYSLWEVVKEGQYHKELGCFVRFISSGDIVSITENRGNQFDQLSYEGLAYPQYADWRKKASKFVSLWQITKKNKKKEIVTVEAKEKFDAICKYQPRLYKFNKEYAYLLRDIVRGKSLVELQQIRQEIFRFIEQDCGVTRLGSLSLSTLETVKAVKGIIYSYFSTALNASKNNPISDEQRKEFDPELFALLEKLELIRTRKKKQKVERIANSLIQTCLENNIKFIRGEGDLSTTNNATKKKANSRSMDWQARGVFNKIRQLAPMHNITLFGCGSLYTSHQDPLVHRNPDKAMKCRWAAIPVKDIGDWVLRKLSQNLRAKNRGTGEYYHQGVKEFLSHYELQDLEEELLKWRSDRKSNIPCWVLQNRLAEKLGNKEAVVYIPVRGGRIYFATHKVATGAVSIVFDQKQVWVCNADHVAAANIALTGKGIGEQSSDEENPDGGRIKLQLTS

SEQ ID NO: 502 - protein, 1054 aa, Artificial Sequence
  Synthetic Construct
MSSAIKSYKSVLRPNERKNQLLKSTIQCLEDGSAFFFKMLQGLFGGITPEIVRFSTEQEKQQQDIALWCAVNWFRPVSQDSLTHTIASDNLVEKFEEYYGGTASDAIKQYFSASIGESYYWNDCRQQYYDLCRELGVEVSDLTHDLEILCREKCLAVATESNQNNSIISVLFGTGEKEDRSVKLRITKKILEAISNLKEIPKNVAPIQEIILNVAKATKETFRQVYAGNLGAPSTLEKFIAKDGQKEFDLKKLQTDLKKVIRGKSKERDWCCQEELRSYVEQNTIQYDLWAWGEMFNKAHTALKIKSTRNYNFAKQRLEQFKEIQSLNNLLVVKKLNDFFDSEFFSGEETYTICVHHLGGKDLSKLYKAWEDDPADPENAIVVLCDDLKNNFKKEPIRNILRYIFTIRQECSAQDILAAAKYNQQLDRYKSQKANPSVLGNQGFTWTNAVILPEKAQRNDRPNSLDLRIWLYLKLRHPDGRWKKHHIPFYDTRFFQEIYAAGNSPVDTCQFRTPRFGYHLPKLTDQTAIRVNKKHVKAAKTEARIRLAIQQGTLPVSNLKITEISATINSKGQVRIPVKFRVGRQKGTLQIGDRFCGYDQNQTASHAYSLWEVVKEGQYHKELGCFVRFISSGDIVSITENRGNQFDQLSYEGLAYPQYADWRKKASKFVSLWQITKKNKKKEIVTVEAKEKFDAICKYQPRLYKFNKEYAYLLRDIVRGKSLVELQQIRQEIFRFIEQDCGVTRLGSLSLSTLETVKAVKGIIYSYFSTALNASKNNPISDEQRKEFDPELFALLEKLELIRTRKKKQKVERIANSLIQTCLENNIKFIRGEGDLSTTNNATKKKANSRSMDWLARGVFNKIRQLAPMSNITLFGCGSLYTSHQDPLVHRNPDKAMKCRWAAIPVKDIGDWVLRKLSQNLRAKNRGTGEYYHQGVKEFLSHYELQDLEEELLKWRSDRKSNIPCWVLQNRLAEKLGNKEAVVYIPVRGGRIYFATHKVATGAVSIVFDQKQVWVCNADHVAAANIALTGKGIGEQSSDEENPDGGRIKLQLTS

SEQ ID NO: 503 - protein, 1054 aa, Artificial Sequence
  Synthetic Construct
MSSAIKSYKSVLRPNERKNQLLKSTIQCLEDGSAFFFKMLQGLFGGITPEIVRFSTEQEKQQQDIALWCAVNWFRPVSQDSLTHTIASDNLVEKFEEYYGGTASDAIKQYFSASIGESYYWNDCRQQYYDLCRELGVEVSDLTHDLEILCREKCLAVATESNQNNSIISVLFGTGEKEDRSVKLRITKKILEAISNLKEIPKNVAPIQEIILNVAKATKETFRQVYAGNLGAPSTLEKFIAKDGQKEFDLKKLQTDLKKVIRGKSKERDWCCQEELRSYVEQNTIQYDLWAWGEMFNKAHTALKIKSTRNYNFAKQRLEQFKEIQSLNNLLVVKKLNDFFDSEFFSGEETYTICVHHLGGKDLSKLYKAWEDDPADPENAIVVLCDDLKNNFKKEPIRNILRYIFTIRQECSAQDILAAAKYNQQLDRYKSQKANPSVLGNQGFTWTNAVILPEKAQRNDRPNSLDLRIWLYLKLRHPDGRWKKHHIPFYDTRFFQEIYAAGNSPVDTCQFRTPRFGYHLPKLTDQTAIRVNKKHVKAAKTEARIRLAIQQGTLPVSNLKITEISATINSKGQVRIPVKFRVGRQKGTLQIGDRFCGYDQNQTASHAYSLWEVVKEGQYHKELGCFVRFISSGDIVSITENRGNQFDQLSYEGLAYPQYADWRKKASKFVSLWQITKKNKKKEIVTVEAKEKFDAICKYQPRLYKFNKEYAYLLRDIVRGKSLVELQQIRQEIFRFIEQDCGVTRLGSLSLSTLETVKAVKGIIYSYFSTALNASKNNPISDEQRKEFDPELFALLEKLELIRTRKKKQKVERIANSLIQTCLENNIKFIRGEGDLSTTNNATKKKANSRSMDWLARGVFNKIRQLQPMHNITLFGCGSLYTSHQDPLVHRNPDKAMKCRWAAIPVKDIGDWVLRKLSQNLRAKNRGTGEYYHQGVKEFLSHYELQDLEEELLKWRSDRKSNIPCWVLQNRLAEKLGNKEAVVYIPVRGGRIYFATHKVATGAVSIVFDQKQVWVCNADHVAAANIALTGKGIGEQSSDEENPDGGRIKLQLTS

SEQ ID NO: 504 - protein, 1054 aa, Artificial Sequence
  Synthetic Construct
MSSAIKSYKSVLRPNERKNQLLKSTIQCLEDGSAFFFKMLQGLFGGITPEIVRFSTEQEKQQQDIALWCAVNWFRPVSQDSLTHTIASDNLVEKFEEYYGGTASDAIKQYFSASIGESYYWNDCRQQYYDLCRELGVEVSDLTHDLEILCREKCLAVATESNQNNSIISVLFGTGEKEDRSVKLRITKKILEAISNLKEIPKNVAPIQEIILNVAKATKETFRQVYAGNLGAPSTLEKFIAKDGQKEFDLKKLQTDLKKVIRGKSKERDWCCQEELRSYVEQNTIQYDLWAWGEMFNKAHTALKIKSTRNYNFAKQRLEQFKEIQSLNNLLVVKKLNDFFDSEFFSGEETYTICVHHLGGKDLSKLYKAWEDDPADPENAIVVLCDDLKNNFKKEPIRNILRYIFTIRQECSAQDILAAAKYNQQLDRYKSQKANPSVLGNQGFTWTNAVILPEKAQRNDRPNSLDLRIWLYLKLRHPDGRWKKHHIPFYDTRFFQEIYAAGNSPVDTCQFRTPRFGYHLPKLTDQTAIRVNKKHVKAAKTEARIRLAIQQGTLPVSNLKITEISATINSKGQVRIPVKFRVGRQKGTLQIGDRFCGYDQNQTASHAYSLWEVVKEGQYHKELGCFVRFISSGDIVSITENRGNQFDQLSYEGLAYPQYADWRKKASKFVSLWQITKKNKKKEIVTVEAKEKFDAICKYQPRLYKFNKEYAYLLRDIVRGKSLVELQQIRQEIFRFIEQDCGVTRLGSLSLSTLETVKAVKGIIYSYFSTALNASKNNPISDEQRKEFDPELFALLEKLELIRTRKKKQKVERIANSLIQTCLENNIKFIRGEGDLSTTNNATKKKANSRSMDWLARGTFNKIRQLAPMHNITLFGCGSLYTSHQDPLVHRNPDKAMKCRWAAIPVKDIGDWVLRKLSQNLRAKNRGTGEYYHQGVKEFLSHYELQDLEEELLKWRSDRKSNIPCWVLQNRLAEKLGNKEAVVYIPVRGGRIYFATHKVATGAVSIVFDQKQVWVCNADHVAAANIALTGKGIGEQSSDEENPDGGRIKLQLTS

SEQ ID NO: 505 - protein, 1054 aa, Artificial Sequence
  Synthetic Construct
MSSAIKSYKSVLRPNERKNQLLKSTIQCLEDGSAFFFKMLQGLFGGITPEIVRFSTEQEKQQQDIALWCAVNWFRPVSQDSLTHTIASDNLVEKFEEYYGGTASDAIKQYFSASIGESYYWNDCRQQYYDLCRELGVEVSDLTHDLEILCREKCLAVATESNQNNSIISVLFGTGEKEDRSVKLRITKKILEAISNLKEIPKNVAPIQEIILNVAKATKETFRQVYAGNLGAPSTLEKFIAKDGQKEFDLKKLQTDLKKVIRGKSKERDWCCQEELRSYVEQNTIQYDLWAWGEMFNKAHTALKIKSTRNYNFAKQRLEQFKEIQSLNNLLVVKKLNDFFDSEFFSGEETYTICVHHLGGKDLSKLYKAWEDDPADPENAIVVLCDDLKNNFKKEPIRNILRYIFTIRQECSAQDILAAAKYNQQLDRYKSQKANPSVLGNQGFTWTNAVILPEKAQRNDRPNSLDLRIWLYLKLRHPDGRWKKHHIPFYDTRFFQEIYAAGNSPVDTCQFRTPRFGYHLPKLTDQTAIRVNKKHVKAAKTEARIRLAIQQGTLPVSNLKITEISATINSKGQVRIPVKFRVGRQKGTLQIGDRFCGYDQNQTASHAYSLWEVVKEGQYHKELGCFVRFISSGDIVSITENRGNQFDQLSYEGLAYPQYADWRKKASKFVSLWQITKKNKKKEIVTVEAKEKFDAICKYQPRLYKFNKEYAYLLRDIVRGKSLVELQQIRQEIFRFIEQDCGVTRLGSLSLSTLETVKAVKGIIYSYFSTALNASKNNPISDEQRKEFDPELFALLEKLELIRTRKKKQKVERIANSLIQTCLENNIKFIRGEGDLSTTNNATKKKANSRSMDWLARGVFNKIRQLATMHNITLFGCGSLYTSHQDPLVHRNPDKAMKCRWAAIPVKDIGDWVLRKLSQNLRAKNRGTGEYYHQGVKEFLSHYELQDLEEELLKWRSDRKSNIPCWVLQNRLAEKLGNKEAVVYIPVRGGRIYFATHKVATGAVSIVFDQKQVWVCNADHVAAANIALTGKGIGEQSSDEENPDGGRIKLQLTS

SEQ ID NO: 506 - protein, 1054 aa, Artificial Sequence
  Synthetic Construct
MSSAIKSYKSVLRPNERKNQLLKSTIQCLEDGSAFFFKMLQGLFGGITPEIVRFSTEQEKQQQDIALWCAVNWFRPVSQDSLTHTIASDNLVEKFEEYYGGTASDAIKQYFSASIGESYYWNDCRQQYYDLCRELGVEVSDLTHDLEILCREKCLAVATESNQNNSIISVLFGTGEKEDRSVKLRITKKILEAISNLKEIPKNVAPIQEIILNVAKATKETFRQVYAGNLGAPSTLEKFIAKDGQKEFDLKKLQTDLKKVIRGKSKERDWCCQEELRSYVEQNTIQYDLWAWGEMFNKAHTALKIKSTRNYNFAKQRLEQFKEIQSLNNLLVVKKLNDFFDSEFFSGEETYTICVHHLGGKDLSKLYKAWEDDPADPENAIVVLCDDLKNNFKKEPIRNILRYIFTIRQECSAQDILAAAKYNQQLDRYKSQKANPSVLGNQGFTWTNAVILPEKAQRNDRPNSLDLRIWLYLKLRHPDGRWKKHHIPFYDTRFFQEIYAAGNSPVDTCQFRTPRFGYHLPKLTDQTAIRVNKKHVKAAKTEARIRLAIQQGTLPVSNLKITEISATINSKGQVRIPVKFRVGRQKGTLQIGDRFCGYDQNQTASHAYSLWEVVKEGQYHKELGCFVRFISSGDIVSITENRGNQFDQLSYEGLAYPQYADWRKKASKFVSLWQITKKNKKKEIVTVEAKEKFDAICKYQPRLYKFNKEYAYLLRDIVRGKSLVELQQIRQEIFRFIEQDCGVTRLGSLSLSTLETVKAVKGIIYSYFSTALNASKNNPISDEQRKEFDPELFALLEKLELIRTRKKKQKVERIANSLIQTCLENNIKFIRGEGDLSTTNNATKKKANSRSMDWLASGVFNKIRQLAPMHNITLFGCGSLYTSHQDPLVHRNPDKAMKCRWAAIPVKDIGDWVLRKLSQNLRAKNRGTGEYYHQGVKEFLSHYELQDLEEELLKWRSDRKSNIPCWVLQNRLAEKLGNKEAVVYIPVRGGRIYFATHKVATGAVSIVFDQKQVWVCNADHVAAANIALTGKGIGEQSSDEENPDGGRIKLQLTS

SEQ ID NO: 507 - protein, 1054 aa, Artificial Sequence
  Synthetic Construct
MSSAIKSYKSVLRPNERKNQLLKSTIQCLEDGSAFFFKMLQGLFGGITPEIVRFSTEQEKQQQDIALWCAVNWFRPVSQDSLTHTIASDNLVEKFEEYYGGTASDAIKQYFSASIGESYYWNDCRQQYYDLCRELGVEVSDLTHDLEILCREKCLAVATESNQNNSIISVLFGTGEKEDRSVKLRITKKILEAISNLKEIPKNVAPIQEIILNVAKATKETFRQVYAGNLGAPSTLEKFIAKDGQKEFDLKKLQTDLKKVIRGKSKERDWCCQEELRSYVEQNTIQYDLWAWGEMFNKAHTALKIKSTRNYNFAKQRLEQFKEIQSLNNLLVVKKLNDFFDSEFFSGEETYTICVHHLGGKDLSKLYKAWEDDPADPENAIVVLCDDLKNNFKKEPIRNILRYIFTIRQECSAQDILAAAKYNQQLDRYKSQKANPSVLGNQGFTWTNAVILPEKAQRNDRPNSLDLRIWLYLKLRHPDGRWKKHHIPFYDTRFFQEIYAAGNSPVDTCQFRTPRFGYHLPKLTDQTAIRVNKKHVKAAKTEARIRLAIQQGTLPVSNLKITEISATINSKGQVRIPVKFRVGRQKGTLQIGDRFCGYDQNQTASHAYSLWEVVKEGQYHKELGCFVRFISSGDIVSITENRGNQFDQLSYEGLAYPQYADWRKKASKFVSLWQITKKNKKKEIVTVEAKEKFDAICKYQPRLYKFNKEYAYLLRDIVRGKSLVELQQIRQEIFRFIEQDCGVTRLGSLSLSTLETVKAVKGIIYSYFSTALNASKNNPISDEQRKEFDPELFALLEKLELIRTRKKKQKVERIANSLIQTCLENNIKFIRGEGDLSTTNNATKKKANSRSMDWLARGVFNKIRQLAPMHPITLFGCGSLYTSHQDPLVHRNPDKAMKCRWAAIPVKDIGDWVLRKLSQNLRAKNRGTGEYYHQGVKEFLSHYELQDLEEELLKWRSDRKSNIPCWVLQNRLAEKLGNKEAVVYIPVRGGRIYFATHKVATGAVSIVFDQKQVWVCNADHVAAANIALTGKGIGEQSSDEENPDGGRIKLQLTS

SEQ ID NO: 508 - protein, 1054 aa, Artificial Sequence
  Synthetic Construct
MSSAIKSYKSVLRPNERKNQLLKSTIQCLEDGSAFFFKMLQGLFGGITPEIVRFSTEQEKQQQDIALWCAVNWFRPVSQDSLTHTIASDNLVEKFEEYYGGTASDAIKQYFSASIGESYYWNDCRQQYYDLCRELGVEVSDLTHDLEILCREKCLAVATESNQNNSIISVLFGTGEKEDRSVKLRITKKILEAISNLKEIPKNVAPIQEIILNVAKATKETFRQVYAGNLGAPSTLEKFIAKDGQKEFDLKKLQTDLKKVIRGKSKERDWCCQEELRSYVEQNTIQYDLWAWGEMFNKAHTALKIKSTRNYNFAKQRLEQFKEIQSLNNLLVVKKLNDFFDSEFFSGEETYTICVHHLGGKDLSKLYKAWEDDPADPENAIVVLCDDLKNNFKKEPIRNILRYIFTIRQECSAQDILAAAKYNQQLDRYKSQKANPSVLGNQGFTWTNAVILPEKAQRNDRPNSLDLRIWLYLKLRHPDGRWKKHHIPFYDTRFFQEIYAAGNSPVDTCQFRTPRFGYHLPKLTDQTAIRVNKKHVKAAKTEARIRLAIQQGTLPVSNLKITEISATINSKGQVRIPVKFRVGRQKGTLQIGDRFCGYDQNQTASHAYSLWEVVKEGQYHKELGCFVRFISSGDIVSITENRGNQFDQLSYEGLAYPQYADWRKKASKFVSLWQITKKNKKKEIVTVEAKEKFDAICKYQPRLYKFNKEYAYLLRDIVRGKSLVELQQIRQEIFRFIEQDCGVTRLGSLSLSTLETVKAVKGIIYSYFSTALNASKNNPISDEQRKEFDPELFALLEKLELIRTRKKKQKVERIANSLIQTCLENNIKFIRGEGDLSTTNNATKKKANSLSMDWLARGVFNKIRQLAPMHNITLFGCGSLYTSHQDPLVHRNPDKAMKCRWAAIPVKDIGDWVLRKLSQNLRAKNRGTGEYYHQGVKEFLSHYELQDLEEELLKWRSDRKSNIPCWVLQNRLAEKLGNKEAVVYIPVRGGRIYFATHKVATGAVSIVFDQKQVWVCNADHVAAANIALTGKGIGEQSSDEENPDGGRIKLQLTS

SEQ ID NO: 509 - protein, 1054 aa, Artificial Sequence
  Synthetic Construct
MSSAIKSYKSVLRPNERKNQLLKSTIQCLEDGSAFFFKMLQGLFGGITPEIVRFSTEQEKQQQDIALWCAVNWFRPVSQDSLTHTIASDNLVEKFEEYYGGTASDAIKQYFSASIGESYYWNDCRQQYYDLCRELGVEVSDLTHDLEILCREKCLAVATESNQNNSIISVLFGTGEKEDRSVKLRITKKILEAISNLKEIPKNVAPIQEIILNVAKATKETFRQVYAGNLGAPSTLEKFIAKDGQKEFDLKKLQTDLKKVIRGKSKERDWCCQEELRSYVEQNTIQYDLWAWGEMFNKAHTALKIKSTRNYNFAKQRLEQFKEIQSLNNLLVVKKLNDFFDSEFFSGEETYTICVHHLGGKDLSKLYKAWEDDPADPENAIVVLCDDLKNNFKKEPIRNILRYIFTIRQECSAQDILAAAKYNQQLDRYKSQKANPSVLGNQGFTWTNAVILPEKAQRNDRPNSLDLRIWLYLKLRHPDGRWKKHHIPFYDTRFFQEIYAAGNSPVDTCQFRTPRFGYHLPKLTDQTAIRVNKKHVKAAKTEARIRLAIQQGTLPVSNLKITEISATINSKGQVRIPVKFRVGRQKGTLQIGDRFCGYDQNLTASHAYSLWEVVKEGQYHKELGCFVRFISSGDIVSITENRGNQFDQLSYEGLAYPQYADWRKKASKFVSLWQITKKNKKKEIVTVEAKEKFDAICKYQPRLYKFNKEYAYLLRDIVRGKSLVELQQIRQEIFRFIEQDCGVTRLGSLSLSTLETVKAVKGIIYSYFSTALNASKNNPISDEQRKEFDPELFALLEKLELIRTRKKKQKVERIANSLIQTCLENNIKFIRGEGDLSTTNNATKKKANSRSMDWLARGVFNKIRQLAPMHNITLFGCGSLYTSHQDPLVHRNPDKAMKCRWAAIPVKDIGDWVLRKLSQNLRAKNRGTGEYYHQGVKEFLSHYELQDLEEELLKWRSDRKSNIPCWVLQNRLAEKLGNKEAVVYIPVRGGRIYFATHKVATGAVSIVFDQKQVWVCNADHVAAANIALTGKGIGEQSSDEENPDGGRIKLQLTS

SEQ ID NO: 510 - protein, 1054 aa, Artificial Sequence
  Synthetic Construct
MSSAIKSYKSVLRPNERKNQLLKSTIQCLEDGSAFFFKMLQGLFGGITPEIVRFSTEQEKQQQDIALWCAVNWFRPVSQDSLTHTIASDNLVEKFEEYYGGTASDAIKQYFSASIGESYYWNDCRQQYYDLCRELGVEVSDLTHDLEILCREKCLAVATESNQNNSIISVLFGTGEKEDRSVKLRITKKILEAISNLKEIPKNVAPIQEIILNVAKATKETFRQVYAGNLGAPSTLEKFIAKDGQKEFDLKKLQTDLKKVIRGKSKERDWCCQEELRSYVEQNTIQYDLWAWGEMFNKAHTALKIKSTRNYNFAKQRLEQFKEIQSLNNLLVVKKLNDFFDSEFFSGEETYTICVHHLGGKDLSKLYKAWEDDPADPENAIVVLCDDLKNNFKKEPIRNILRYIFTIRQECSAQDILAAAKYNQQLDRYKSQKANPSVLGNQGFTWTNAVILPEKAQRNDRPNSLDLRIWLYLKLRHPDGRWKKHHIPFYDTRFFQEIYAAGNSPVDTCQFRTPRFGYHLPKLTDQTAIRVNKKHVKAAKTEARIRLAIQQGTLPVSNLKITEISATINSKGQVRIPVKFRVGRQKGTLQIGDRFCGYDQNQTASHAYSLWEVVKEGQYHKELGCFVRFISSGDIVSITENRGNQFDQLSYEGLAYPQYADWRKKASKFVSLWQITKKNKKKEIVTVEAKEKFDAICKYQPRLYKFNKEYAYLLRDIVRGKSLVELQQIRQEIFRFIEQDCGVTRLGSLSLSTLETVKAVKGIIYSYFSTALNASKNNPISDEQRKEFDPELFALLEKLELIRTRKKKQKVERIANSLIQTCLENNIKFIRGEGDLSTTNNATKKKANSRSMDWLARGVFNKIRQLAPLHNITLFGCGSLYTSHQDPLVHRNPDKAMKCRWAAIPVKDIGDWVLRKLSQNLRAKNRGTGEYYHQGVKEFLSHYELQDLEEELLKWRSDRKSNIPCWVLQNRLAEKLGNKEAVVYIPVRGGRIYFATHKVATGAVSIVFDQKQVWVCNADHVAAANIALTGKGIGEQSSDEENPDGGRIKLQLTS

SEQ ID NO: 511 - protein, 1054 aa, Artificial Sequence
  Synthetic Construct
MSSAIKSYKSVLRPNERKNQLLKSTIQCLEDGSAFFFKMLQGLFGGITPEIVRFSTEQEKQQQDIALWCAVNWFRPVSQDSLTHTIASDNLVEKFEEYYGGTASDAIKQYFSASIGESYYWNDCRQQYYDLCRELGVEVSDLTHDLEILCREKCLAVATESNQNNSIISVLFGTGEKEDRSVKLRITKKILEAISNLKEIPKNVAPIQEIILNVAKATKETFRQVYAGNLGAPSTLEKFIAKDGQKEFDLKKLQTDLKKVIRGKSKERDWCCQEELRSYVEQNTIQYDLWAWGEMFNKAHTALKIKSTRNYNFAKQRLEQFKEIQSLNNLLVVKKLNDFFDSEFFSGEETYTICVHHLGGKDLSKLYKAWEDDPADPENAIVVLCDDLKNNFKKEPIRNILRYIFTIRQECSAQDILAAAKYNQQLDRYKSQKANPSVLGNQGFTWTNAVILPEKAQRNDRPNSLDLRIWLYLKLRHPDGRWKKHHIPFYDTRFFQEIYAAGNSPVDTCQFRTPRFGYHLPKLTDQTAIRVNKKHVKAAKTEARIRLAIQQGTLPVSNLKITEISATINSKGQVRIPVKFRVGRQKGTLQIGDRFCGYDQNQTASHAYSLWEVVKEGQYHKELGCFVRFISSGDIVSITENRGNQFDQLSYEGLAYPQYADWRKKASKFVSLWQITKKNKKKEIVTVEAKEKFDAICKYQPRLYKFNKEYAYLLRDIVRGKSLVELQQIRQEIFRFIEQDCGVTRLGSLSLSTLETVKAVKGIIYSYFSTALNASKNNPISDEQRKEFDPELFALLEKLELIRTRKKKQKVERIANSLIQTCLENNIKFIRGEGDLSTTNNATKKKANSRSMDWLARGVFNKIRQLAPMHNITLFGCGSWYTSHQDPLVHRNPDKAMKCRWAAIPVKDIGDWVLRKLSQNLRAKNRGTGEYYHQGVKEFLSHYELQDLEEELLKWRSDRKSNIPCWVLQNRLAEKLGNKEAVVYIPVRGGRIYFATHKVATGAVSIVFDQKQVWVCNADHVAAANIALTGKGIGEQSSDEENPDGGRIKLQLTS

SEQ ID NO: 512 - protein, 1054 aa, Artificial Sequence
  Synthetic Construct
MSSAIKSYKSVLRPNERKNQLLKSTIQCLEDGSAFFFKMLQGLFGGITPEIVRFSTEQEKQQQDIALWCAVNWFRPVSQDSLTHTIASDNLVEKFEEYYGGTASDAIKQYFSASIGESYYWNDCRQQYYDLCRELGVEVSDLTHDLEILCREKCLAVATESNQNNSIISVLFGTGEKEDRSVKLRITKKILEAISNLKEIPKNVAPIQEIILNVAKATKETFRQVYAGNLGAPSTLEKFIAKDGQKEFDLKKLQTDLKKVIRGKSKERDWCCQEELRSYVEQNTIQYDLWAWGEMFNKAHTALKIKSTRNYNFAKQRLEQFKEIQSLNNLLVVKKLNDFFDSEFFSGEETYTICVHHLGGKDLSKLYKAWEDDPADPENAIVVLCDDLKNNFKKEPIRNILRYIFTIRQECSAQDILAAAKYNQQLDRYKSQKANPSVLGNQGFTWTNAVILPEKAQRNDRPNSLDLRIWLYLKLRHPDGRWKKHHIPFYDTRFFQEIYAAGNSPVDTCQFRTPRFGYHLPKLTDQTAIRVNKKHVKAAKTEARIRLAIQQGTLPVSNLKITEISATINSKGQVRIPVKFRVGRQKGTLQIGDRFCGYDQNQTASHAYSLWEVVKEGQYHKELGCFVRFISSGDIVSITENRGNQFDQLSYEGLAYPQYADWRKKASKFVSLWQITKKNKKKEIVTVEAKEKFDAICKYQPRLYKFNKEYAYLLRDIVRGKSLVELQQIRQEIFRFIEQDCGVTRLGSLSLSTLETVKAVKGIIYSYFSTALNASKNNPISDEQRKEFDPELFALLEKLELIRTRKKKQKVERIANSLIQTCLENNIKFIRGEGDLSTTNNATKKKANSRSMDWLARGVFNKIRQLAPWHNITLFGCGSLYTSHQDPLVHRNPDKAMKCRWAAIPVKDIGDWVLRKLSQNLRAKNRGTGEYYHQGVKEFLSHYELQDLEEELLKWRSDRKSNIPCWVLQNRLAEKLGNKEAVVYIPVRGGRIYFATHKVATGAVSIVFDQKQVWVCNADHVAAANIALTGKGIGEQSSDEENPDGGRIKLQLTS

SEQ ID NO: 513 - DNA, 47 bp, Artificial Sequence
  Synthetic Construct
gttgtgagcaagggcgaggaggataacgcctctctcccagcgactat

SEQ ID NO: 514 - DNA, 47 bp, Artificial Sequence
  Synthetic Construct
atagtcgctgggagagaggcgttatcctcctcgcccttgctcacaac

SEQ ID NO: 515 - DNA, 15 bp, Artificial Sequence
  Synthetic Construct
  misc_feature (15)..(15): n is 3' dideoxycytidine
ctgtctcttatacan

SEQ ID NO: 516 - DNA, 34 bp, Artificial Sequence
  Synthetic Construct
gtctcgtgggctcggagatgtgtataagagacag

SEQ ID NO: 517 - DNA, 23 bp, Artificial Sequence
  Synthetic Construct
gtcgctgggagagaggcgttatc

SEQ ID NO: 518 - DNA, 23 bp, Artificial Sequence
  Synthetic Construct
gtctcgtgggctcggagatgtgt

SEQ ID NO: 519 - DNA, 93 bp, Artificial Sequence
  Synthetic Construct
aatgatacggcgaccaccgagatctacactatagcctacactctttccctacacgacgctcttccgatctttatcctcctcgcccttgctcac

SEQ ID NO: 520 - DNA, 93 bp, Artificial Sequence
  Synthetic Construct
aatgatacggcgaccaccgagatctacactatagcctacactctttccctacacgacgctcttccgatctgttatcctcctcgcccttgctca

SEQ ID NO: 521 - DNA, 93 bp, Artificial Sequence
  Synthetic Construct
aatgatacggcgaccaccgagatctacactatagcctacactctttccctacacgacgctcttccgatctcgttatcctcctcgcccttgctc

SEQ ID NO: 522 - DNA, 93 bp, Artificial Sequence
  Synthetic Construct
aatgatacggcgaccaccgagatctacactatagcctacactctttccctacacgacgctcttccgatctgcgttatcctcctcgcccttgct

SEQ ID NO: 523 - DNA, 93 bp, Artificial Sequence
  Synthetic Construct
aatgatacggcgaccaccgagatctacactatagcctacactctttccctacacgacgctcttccgatctggcgttatcctcctcgcccttgc

SEQ ID NO: 524 - DNA, 93 bp, Artificial Sequence
  Synthetic Construct
aatgatacggcgaccaccgagatctacactatagcctacactctttccctacacgacgctcttccgatctaggcgttatcctcctcgcccttg

SEQ ID NO: 525 - DNA, 93 bp, Artificial Sequence
  Synthetic Construct
aatgatacggcgaccaccgagatctacactatagcctacactctttccctacacgacgctcttccgatctgaggcgttatcctcctcgccctt

SEQ ID NO: 526 - DNA, 93 bp, Artificial Sequence
  Synthetic Construct
aatgatacggcgaccaccgagatctacactatagcctacactctttccctacacgacgctcttccgatctagaggcgttatcctcctcgccct

SEQ ID NO: 527 - DNA, 93 bp, Artificial Sequence
  Synthetic Construct
aatgatacggcgaccaccgagatctacactatagcctacactctttccctacacgacgctcttccgatctgagaggcgttatcctcctcgccc

SEQ ID NO: 528 - DNA, 93 bp, Artificial Sequence
  Synthetic Construct
aatgatacggcgaccaccgagatctacactatagcctacactctttccctacacgacgctcttccgatctagagaggcgttatcctcctcgcc

SEQ ID NO: 529 - DNA, 93 bp, Artificial Sequence
  Synthetic Construct
aatgatacggcgaccaccgagatctacactatagcctacactctttccctacacgacgctcttccgatctgagagaggcgttatcctcctcgc

SEQ ID NO: 530 - DNA, 93 bp, Artificial Sequence
  Synthetic Construct
aatgatacggcgaccaccgagatctacactatagcctacactctttccctacacgacgctcttccgatctggagagaggcgttatcctcctcg

SEQ ID NO: 531 - DNA, 55 bp, Artificial Sequence
  Synthetic Construct
caagcagaagacggcatacgagatcgagtaatgtctcgtgggctcggagatgtgt

SEQ ID NO: 532 - DNA, 55 bp, Artificial Sequence
  Synthetic Construct
caagcagaagacggcatacgagattctccggagtctcgtgggctcggagatgtgt

SEQ ID NO: 533 - DNA, 55 bp, Artificial Sequence
  Synthetic Construct
caagcagaagacggcatacgagataatgagcggtctcgtgggctcggagatgtgt

SEQ ID NO: 534 - DNA, 55 bp, Artificial Sequence
  Synthetic Construct
caagcagaagacggcatacgagatggaatctcgtctcgtgggctcggagatgtgt

SEQ ID NO: 535 - DNA, 55 bp, Artificial Sequence
  Synthetic Construct
caagcagaagacggcatacgagatttctgaatgtctcgtgggctcggagatgtgt

SEQ ID NO: 536 - DNA, 55 bp, Artificial Sequence
  Synthetic Construct
caagcagaagacggcatacgagatacgaattcgtctcgtgggctcggagatgtgt

SEQ ID NO: 537 - DNA, 55 bp, Artificial Sequence
  Synthetic Construct
caagcagaagacggcatacgagatagcttcaggtctcgtgggctcggagatgtgt

SEQ ID NO: 538 - DNA, 55 bp, Artificial Sequence
  Synthetic Construct
caagcagaagacggcatacgagatgcgcattagtctcgtgggctcggagatgtgt

SEQ ID NO: 539 - DNA, 55 bp, Artificial Sequence
  Synthetic Construct
caagcagaagacggcatacgagatcatagccggtctcgtgggctcggagatgtgt

SEQ ID NO: 540 - DNA, 55 bp, Artificial Sequence
  Synthetic Construct
caagcagaagacggcatacgagatttcgcggagtctcgtgggctcggagatgtgt

SEQ ID NO: 541 - DNA, 55 bp, Artificial Sequence
  Synthetic Construct
caagcagaagacggcatacgagatgcgcgagagtctcgtgggctcggagatgtgt

SEQ ID NO: 542 - DNA, 55 bp, Artificial Sequence
  Synthetic Construct
caagcagaagacggcatacgagatctatcgctgtctcgtgggctcggagatgtgt

SEQ ID NO: 543 - DNA, 55 bp, Artificial Sequence
  Synthetic Construct
caagcagaagacggcatacgagattgtagtgcgtctcgtgggctcggagatgtgt

SEQ ID NO: 544 - DNA, 55 bp, Artificial Sequence
  Synthetic Construct
caagcagaagacggcatacgagatgcgtcgacgtctcgtgggctcggagatgtgt

SEQ ID NO: 545 - DNA, 55 bp, Artificial Sequence
  Synthetic Construct
caagcagaagacggcatacgagatggtcttctgtctcgtgggctcggagatgtgt

SEQ ID NO: 546 - DNA, 55 bp, Artificial Sequence
  Synthetic Construct
caagcagaagacggcatacgagataaatgtccgtctcgtgggctcggagatgtgt

SEQ ID NO: 547 - DNA, 55 bp, Artificial Sequence
  Synthetic Construct
caagcagaagacggcatacgagatgttgaaacgtctcgtgggctcggagatgtgt

SEQ ID NO: 548 - DNA, 55 bp, Artificial Sequence
  Synthetic Construct
caagcagaagacggcatacgagattctttacggtctcgtgggctcggagatgtgt

SEQ ID NO: 549 - DNA, 55 bp, Artificial Sequence
  Synthetic Construct
caagcagaagacggcatacgagatatgcctgggtctcgtgggctcggagatgtgt

SEQ ID NO: 550 - DNA, 55 bp, Artificial Sequence
  Synthetic Construct
caagcagaagacggcatacgagatcaataagggtctcgtgggctcggagatgtgt

SEQ ID NO: 551 - DNA, 55 bp, Artificial Sequence
  Synthetic Construct
caagcagaagacggcatacgagatcgccgtaagtctcgtgggctcggagatgtgt

SEQ ID NO: 552 - DNA, 55 bp, Artificial Sequence
  Synthetic Construct
caagcagaagacggcatacgagattaaggcttgtctcgtgggctcggagatgtgt

SEQ ID NO: 553 - DNA, 55 bp, Artificial Sequence
  Synthetic Construct
caagcagaagacggcatacgagatttgctgccgtctcgtgggctcggagatgtgt

SEQ ID NO: 554 - DNA, 55 bp, Artificial Sequence
  Synthetic Construct
caagcagaagacggcatacgagatctcaatgtgtctcgtgggctcggagatgtgt

SEQ ID NO: 555 - DNA, 20 bp, Artificial Sequence
  Synthetic Construct
gcttttgtccccccaagttt

SEQ ID NO: 556 - DNA, 96 bp, Artificial Sequence
  Synthetic Construct
gcttttgtccccccaagtttgttttagagctagaaatagcaagttaaaataaggctagtccgttatcaacttgaaaaagtggcaccgagtcggtgc

SEQ ID NO: 557 - DNA, 20 bp, Artificial Sequence
  Synthetic Construct
ttgtgagaatggtgcgtcct

SEQ ID NO: 558 - DNA, 96 bp, Artificial Sequence
  Synthetic Construct
ttgtgagaatggtgcgtcctgttttagagctagaaatagcaagttaaaataaggctagtccgttatcaacttgaaaaagtggcaccgagtcggtgc

SEQ ID NO: 559 - DNA, 20 bp, Artificial Sequence
  Synthetic Construct
gctttaactggccctggctt

SEQ ID NO: 560 - DNA, 96 bp, Artificial Sequence
  Synthetic Construct
gctttaactggccctggcttgttttagagctagaaatagcaagttaaaataaggctagtccgttatcaacttgaaaaagtggcaccgagtcggtgc

SEQ ID NO: 561 - DNA, 20 bp, Artificial Sequence
  Synthetic Construct
ctttgtagcctctcccgctc

SEQ ID NO: 562 - DNA, 96 bp, Artificial Sequence
  Synthetic Construct
ctttgtagcctctcccgctcgttttagagctagaaatagcaagttaaaataaggctagtccgttatcaacttgaaaaagtggcaccgagtcggtgc

SEQ ID NO: 563 - DNA, 20 bp, Artificial Sequence
  Synthetic Construct
tgggaagtggttggtcagca

SEQ ID NO: 564 - DNA, 96 bp, Artificial Sequence
  Synthetic Construct
tgggaagtggttggtcagcagttttagagctagaaatagcaagttaaaataaggctagtccgttatcaacttgaaaaagtggcaccgagtcggtgc

SEQ ID NO: 565 - DNA, 20 bp, Artificial Sequence
  Synthetic Construct
gactttagcgggtatgggaa

SEQ ID NO: 566 - DNA, 96 bp, Artificial Sequence
  Synthetic Construct
gactttagcgggtatgggaagttttagagctagaaatagcaagttaaaataaggctagtccgttatcaacttgaaaaagtggcaccgagtcggtgc

SEQ ID NO: 567 - DNA, 20 bp, Artificial Sequence
  Synthetic Construct
tctttgggcgcagggccacc

SEQ ID NO: 568 - DNA, 96 bp, Artificial Sequence
  Synthetic Construct
tctttgggcgcagggccaccgttttagagctagaaatagcaagttaaaataaggctagtccgttatcaacttgaaaaagtggcaccgagtcggtgc

SEQ ID NO: 569 - DNA, 20 bp, Artificial Sequence
  Synthetic Construct
tggatggcgacttcaggcac

SEQ ID NO: 570 - DNA, 96 bp, Artificial Sequence
  Synthetic Construct
tggatggcgacttcaggcacgttttagagctagaaatagcaagttaaaataaggctagtccgttatcaacttgaaaaagtggcaccgagtcggtgc

SEQ ID NO: 571 - DNA, 20 bp, Artificial Sequence
  Synthetic Construct
tttggggaggcctggagtca

SEQ ID NO: 572 - DNA, 96 bp, Artificial Sequence
  Synthetic Construct
tttggggaggcctggagtcagttttagagctagaaatagcaagttaaaataaggctagtccgttatcaacttgaaaaagtggcaccgagtcggtgc

SEQ ID NO: 573 - DNA, 20 bp, Artificial Sequence
  Synthetic Construct
gagccagtgttgctagtcaa

SEQ ID NO: 574 - DNA, 96 bp, Artificial Sequence
  Synthetic Construct
gagccagtgttgctagtcaagttttagagctagaaatagcaagttaaaataaggctagtccgttatcaacttgaaaaagtggcaccgagtcggtgc

SEQ ID NO: 575 - DNA, 20 bp, Artificial Sequence
  Synthetic Construct
ctttagcaagggactattca

SEQ ID NO: 576 - DNA, 96 bp, Artificial Sequence
  Synthetic Construct
ctttagcaagggactattcagttttagagctagaaatagcaagttaaaataaggctagtccgttatcaacttgaaaaagtggcaccgagtcggtgc

SEQ ID NO: 577 - DNA, 20 bp, Artificial Sequence
  Synthetic Construct
taaaattgagcaatctaccc

SEQ ID NO: 578 - DNA, 96 bp, Artificial Sequence
  Synthetic Construct
taaaattgagcaatctacccgttttagagctagaaatagcaagttaaaataaggctagtccgttatcaacttgaaaaagtggcaccgagtcggtgc

SEQ ID NO: 579 - DNA, 20 bp, Artificial Sequence
  Synthetic Construct
tgggggtgaccgccggagcg

SEQ ID NO: 580 - DNA, 96 bp, Artificial Sequence
  Synthetic Construct
tgggggtgaccgccggagcggttttagagctagaaatagcaagttaaaataaggctagtccgttatcaacttgaaaaagtggcaccgagtcggtgc

SEQ ID NO: 581 - DNA, 20 bp, Artificial Sequence
  Synthetic Construct
ctttaatcctccaccagtca

SEQ ID NO: 582 - DNA, 96 bp, Artificial Sequence
  Synthetic Construct
ctttaatcctccaccagtcagttttagagctagaaatagcaagttaaaataaggctagtccgttatcaacttgaaaaagtggcaccgagtcggtgc

SEQ ID NO: 583 - DNA, 20 bp, Artificial Sequence
  Synthetic Construct
ttgttgacattgtccacacc

SEQ ID NO: 584 - DNA, 96 bp, Artificial Sequence
  Synthetic Construct
ttgttgacattgtccacaccgttttagagctagaaatagcaagttaaaataaggctagtccgttatcaacttgaaaaagtggcaccgagtcggtgc

SEQ ID NO: 585 - DNA, 20 bp, Artificial Sequence
  Synthetic Construct
ttttaaactctccatggacc

SEQ ID NO: 586 - DNA, 96 bp, Artificial Sequence
  Synthetic Construct
ttttaaactctccatggaccgttttagagctagaaatagcaagttaaaataaggctagtccgttatcaacttgaaaaagtggcaccgagtcggtgc

SEQ ID NO: 587 - DNA, 20 bp, Artificial Sequence
  Synthetic Construct
tttgcccatactggggacca

SEQ ID NO: 588 - DNA, 96 bp, Artificial Sequence
  Synthetic Construct
tttgcccatactggggaccagttttagagctagaaatagcaagttaaaataaggctagtccgttatcaacttgaaaaagtggcaccgagtcggtgc

SEQ ID NO: 589 - DNA, 20 bp, Artificial Sequence
  Synthetic Construct
gctttgccgtaacccttcgt

SEQ ID NO: 590 - DNA, 96 bp, Artificial Sequence
  Synthetic Construct
gctttgccgtaacccttcgtgttttagagctagaaatagcaagttaaaataaggctagtccgttatcaacttgaaaaagtggcaccgagtcggtgc

SEQ ID NO: 591 - DNA, 43 bp, Artificial Sequence; identical to SEQ ID NO: 263
  Synthetic Construct

SEQ ID NO: 592 - DNA, 20 bp, Artificial Sequence
  Synthetic Construct
gtagcctctcccgctctggt

SEQ ID NO: 593 - DNA, 43 bp, Artificial Sequence; identical to SEQ ID NO: 214
  Synthetic Construct

SEQ ID NO: 594 - DNA, 20 bp, Artificial Sequence
  Synthetic Construct
ggatggcgacttcaggcaca

SEQ ID NO: 595 - DNA, 43 bp, Artificial Sequence; identical to SEQ ID NO: 279
  Synthetic Construct

SEQ ID NO: 596 - DNA, 20 bp, Artificial Sequence
  Synthetic Construct
gagccagtgttgctagtcaa

SEQ ID NO: 597 - DNA, 43 bp, Artificial Sequence; identical to SEQ ID NO: 281
  Synthetic Construct

SEQ ID NO: 598 - DNA, 20 bp, Artificial Sequence
  Synthetic Construct
agcaagggactattcaggga

SEQ ID NO: 599 - DNA, 43 bp, Artificial Sequence; identical to SEQ ID NO: 230
  Synthetic Construct

SEQ ID NO: 600 - DNA, 20 bp, Artificial Sequence
  Synthetic Construct
ttaaactctccatggaccag

SEQ ID NO: 601 - DNA, 43 bp, Artificial Sequence; identical to SEQ ID NO: 297
  Synthetic Construct

SEQ ID NO: 602 - DNA, 20 bp, Artificial Sequence
  Synthetic Construct
gccgtaacccttcgtgggta

SEQ ID NO: 603 - DNA, 23 bp, Artificial Sequence
  Synthetic Construct
ttcacctgcagcttctccaacac

SEQ ID NO: 604 - DNA, 23 bp, Artificial Sequence
  Synthetic Construct
ttaaccttcagcttctccaacac

SEQ ID NO: 605 - DNA, 23 bp, Artificial Sequence
  Synthetic Construct
ttgacctgcagtttctcccacac

SEQ ID NO: 606 - DNA, 23 bp, Artificial Sequence
  Synthetic Construct
ttcaccctcagcttctccaactc

SEQ ID NO: 607 - DNA, 23 bp, Artificial Sequence
  Synthetic Construct
tttaccagcagtcttctcaacaa

SEQ ID NO: 608 - DNA, 24 bp, Artificial Sequence
  Synthetic Construct
ctttaactggccctggctttggca

SEQ ID NO: 609 - DNA, 23 bp, Artificial Sequence
  Synthetic Construct
gctttaactggccctggctttgg

SEQ ID NO: 610 - DNA, 24 bp, Artificial Sequence
  Synthetic Construct
ctttggatggcgacttcaggcaca

SEQ ID NO: 611 - DNA, 23 bp, Artificial Sequence
  Synthetic Construct
tggatggcgacttcaggcacagg

SEQ ID NO: 612 - DNA, 24 bp, Artificial Sequence
  Synthetic Construct
ctttggggaggcctggagtcatgg

SEQ ID NO: 613 - DNA, 23 bp, Artificial Sequence
  Synthetic Construct
tttggggaggcctggagtcatgg

SEQ ID NO: 614 - DNA, 24 bp, Artificial Sequence
  Synthetic Construct
ctttgcccatactggggaccaagg

SEQ ID NO: 615 - DNA, 23 bp, Artificial Sequence
  Synthetic Construct
tttgcccatactggggaccaagg
